(19) United States
(12) Patent Application Publication
(10) Pub. No.: US 2021/0395760 A1
(43) Pub. Date: Dec. 23, 2021

(54) COMPOSITIONS AND METHODS FOR OCHROBACTRUM-MEDIATED GENE EDITING

(71) Applicant: PIONEER HI-BRED INTERNATIONAL, INC., JOHNSTON, IA (US)

(72) Inventors: JYOTHI BOLAR, GRIMES, IA (US); SHUJUN CHANG, JOHNSTON, IA (US); HYEON-JE CHO, ANKENY, IA (US); ZHAN-BIN LIU, CLIVE, IA (US)

(73) Assignee: PIONEER HI-BRED INTERNATIONAL, INC., JOHNSTON, IA (US)

(21) Appl. No.: 17/288,902

(22) PCT Filed: Oct. 30, 2019
(86) PCT No.: PCT/US2019/058750

§ 371 Date: Apr. 26, 2021

Related U.S. Application Data
(60) Provisional application No. 62/753,577, filed on Oct. 31, 2018.

(51) Int. Cl. C12N 15/82; C12N 9/22; C12N 15/11

(52) U.S. Cl. CPC C12N 15/8213; C12N 9/22; C12N 2310/20; C12N 15/8205; C12N 15/8241; C12N 15/111

(57) ABSTRACT

Methods and compositions for increasing, improving or enhancing gene editing efficiency are provided. Configurations of Ochrobactrum and Agrobacterium based vector components such as CRISPR Cas endonucleases and guide RNAs are provided that improve efficiency of targeted genome modification.

### CROSS-REFERENCE TO RELATED APPLICATIONS

[0001] This application claims the benefit of PCT Application Serial Number PCT/US2019/058750, filed Oct. 30, 2019, which claims the benefit of U.S. Provisional Patent Application Ser. No. 62/753,577 filed 31 Oct. 2018, which is herein incorporated by reference in its entirety.

### FIELD OF THE DISCLOSURE

[0002] The present disclosure relates to the field of plant molecular biology, in particular to compositions and methods for modifying the genome of a cell

### REFERENCE TO SEQUENCE LISTING SUBMITTED ELECTRONICALLY

[0003] The official copy of the sequence listing is submitted electronically via EFS-Web as an ASCII formatted sequence listing with a file named “7789-US-PCT_ST25” created on Apr. 23, 2021 and having a size of 603 kilobytes and is filed concurrently with the specification. The sequence listing contained in this ASCII formatted document is part of the specification and is herein incorporated by reference in its entirety.

### BACKGROUND OF THE DISCLOSURE

[0004] Recombinant DNA technology has made it possible to insert DNA sequences at targeted genomic locations and/or modify specific endogenous chromosomal sequences. Site-specific integration techniques, which employ site-specific recombination systems, as well as other types of recombination technologies, have been used to generate targeted insertions of genes of interest in a variety of organisms. Genome-editing techniques such as designer zinc finger nucleases (ZFNs), transcription activator-like effector nucleases (TALENs), or homing meganucleases, are available for producing targeted genome perturbations, but these systems tend to have low specificity and employ designed nucleases that need to be redesigned for each target site, which renders them costly and time-consuming to prepare.

[0005] Newer technologies utilizing archaeal or bacterial adaptive immunity systems have been identified, called CRISPR (Clustered Regularly Interspaced Short Palindromic Repeats), which comprise different domains of effector proteins that encompass a variety of activities (DNA recognition, binding, and optionally cleavage).

[0006] Despite the identification and characterization of some of these systems, there remains a need for identifying novel effectors and systems, as well as demonstrating activity in eukaryotes, particularly animals and plants, to effect improved editing of endogenous and previously-introduced heterologous polynucleotides and for methods and compositions for improving the frequency and efficiency of homology-directed repair of double-strand-break sites.

### SUMMARY OF THE DISCLOSURE

[0007] In an aspect, a method for increasing the efficiency of editing a target site in a plant, the method comprising (a) providing to a plant cell an editing T-DNA, wherein the editing T-DNA comprises in operable linkage from a right border to a left border orientation, a guide RNA expression cassette wherein, the guide RNA expression cassette comprises a regulatory element operably linked to a polynucleotide encoding a guide RNA, wherein the guide RNA is complementary to the target site and a Cas endonuclease expression cassette, wherein the Cas endonuclease expression cassette comprises a regulatory element operably linked to a Cas endonuclease, wherein the guide RNA and the Cas endonuclease are capable of forming a complex that enables the Cas endonuclease to introduce cleavage at the target site; (b) identifying at least one plant cell of (a) that has a modification at the target site, wherein the modification includes at least one deletion or substitution of one or more nucleotides at the target site; and (c) regenerating a plant from the at least one plant cell of (b) having the modification at the target site having increased editing efficiency when compared to a control plant having a modification at the target site provided by a control plant editing T-DNA, wherein the control plant editing T-DNA comprises in operable linkage from a right border to a left border orientation, a Cas endonuclease expression cassette, wherein the Cas endonuclease expression cassette comprises a regulatory element operably linked to a Cas endonuclease and a guide RNA expression cassette wherein, the guide RNA expression cassette comprises a regulatory element operably linked to a polynucleotide encoding a guide RNA, wherein the guide RNA is complementary to the target site and wherein the guide RNA and the Cas endonuclease are capable of forming a complex that enables the Cas endonuclease to introduce cleavage at the target site is provided.

[0008] In an aspect, a method of increasing the efficiency of altering the fatty acid profile in the seed of a plant, the method comprising (a) providing to a plant cell an editing T-DNA, wherein the editing T-DNA comprises in operable linkage from a right border to a left border orientation, a guide RNA expression cassette wherein, the guide RNA expression cassette comprises a regulatory element operably linked to a polynucleotide encoding a guide RNA, wherein the guide RNA is complementary a FAD2 genomic sequence in the plant genome, a FAD3 genomic sequence in the plant genome, or a combination thereof, and a Cas endonuclease expression cassette, wherein the Cas endonuclease expression cassette comprises a regulatory element operably linked to a Cas endonuclease, wherein the guide RNA and the Cas endonuclease are capable of forming a complex that enables the Cas endonuclease to introduce cleavage in the FAD2 genomic sequence in the plant genome, the FAD3 genomic sequence in the plant genome, or a combination thereof; (b) obtaining a plant from the plant cell of (a); (c) evaluating the plant of (b) for the presence of the at least one nucleotide modification; (d) selecting a progeny plant of (c) having an altered fatty acid profile; and (e) obtaining seed from the progeny plant of (d) having increased editing efficiency when compared to a control seed of a plant having a modification of the FAD2 genomic sequence, the FAD3 genomic sequence, or the combination thereof provided by a control seed editing T-DNA, wherein the control seed editing T-DNA comprises in operable linkage from a right border to a left border orientation, a Cas endonuclease expression cassette, wherein the Cas endonuclease expression cassette comprises a regulatory element operably linked to a Cas endonuclease and a guide RNA expression cassette wherein, the guide RNA expression cassette comprises a regulatory element operably linked to a polynucleotide encoding a guide RNA, wherein the guide RNA is complementary a FAD2 genomic sequence in the plant genome, a FAD3 genomic sequence in the plant genome, or a combination thereof wherein the guide RNA and the Cas endonuclease are capable of forming a complex that enables the Cas endonuclease to introduce cleavage in the FAD2 genomic sequence in the plant genome, the FAD3 genomic sequence in the plant genome, or a combination thereof is provided.

[0009] In an aspect, a method of increasing the efficiency of altering the fatty acid profile in the seed of a plant, the method comprising (a) providing to a plant cell an editing T-DNA, wherein the editing T-DNA comprises in operable linkage from a right border to a left border orientation, a guide RNA expression cassette wherein, the guide RNA expression cassette comprises a regulatory element operably linked to a polynucleotide encoding a guide RNA, wherein the guide RNA is complementary a FAD2 genomic sequence in the plant genome, a FAD3 genomic sequence in the plant genome, or a combination thereof, and a Cas endonuclease expression cassette, wherein the Cas endonuclease expression cassette comprises a regulatory element operably linked to a Cas endonuclease, wherein the guide RNA and the Cas endonuclease are capable of forming a complex that enables the Cas endonuclease to introduce cleavage within the FAD2 genomic sequence in the plant genome, the FAD3 genomic sequence in the plant genome, or a combination thereof; (b) obtaining a plant from the plant cell of (a); (c) evaluating the plant of (b) for the presence of the at least one nucleotide modification; (d) screening a progeny plant of (c) having an altered fatty acid profile that is void of the guide RNA and the Cas endonuclease; and (e) obtaining seed from the progeny plant of (d) having increased editing efficiency when compared to a control seed of a plant having a modification of the FAD2 genomic sequence, the FAD3 genomic sequence, or the combination thereof provided by a control seed editing T-DNA, wherein the control seed editing T-DNA comprises in operable linkage from a right border to a left border orientation, a Cas endonuclease expression cassette, wherein the Cas endonuclease expression cassette comprises a regulatory element operably linked to a Cas endonuclease and a guide RNA expression cassette wherein, the guide RNA expression cassette comprises a regulatory element operably linked to a polynucleotide encoding a guide RNA, wherein the guide RNA is complementary a FAD2 genomic sequence in the plant genome, a FAD3 genomic sequence in the plant genome, or a combination thereof, and wherein the guide RNA and the Cas endonuclease are capable of forming a complex that enables the Cas endonuclease to introduce cleavage within the FAD2 genomic sequence in the plant genome, the FAD3 genomic sequence in the plant genome, or a combination thereof is provided.

[0010] In an aspect, a method for increasing the efficiency of introducing a nucleotide of interest into a target site in the genome of a plant, the method comprising (a) providing to a plant cell an editing T-DNA, wherein the editing T-DNA comprises in operable linkage from a right border to a left border orientation, a guide RNA expression cassette wherein, the guide RNA expression cassette comprises a regulatory element operably linked to a polynucleotide encoding a guide RNA and a Cas endonuclease expression cassette, wherein the Cas endonuclease expression cassette comprises a regulatory element operably linked to a Cas endonuclease, wherein the guide RNA and the Cas endonuclease are capable of forming a complex that enables the Cas endonuclease to cleavage at the target site; (b) contacting the plant cell of (a) with a donor DNA comprising the polynucleotide of interest; (c) identifying at least one plant cell from (b) comprising in its genome the polynucleotide of interest integrated at the target site; and (d) regenerating a plant from the at least one plant cell having in its genome the polynucleotide of interest integrated at the target site having increased efficiency of introduction of the polynucleotide of interest into the target site in the genome of the plant cell when compared to a control plant having an introduction of the polynucleotide of interest into the target site in the genome of the plant cell provided by a control plant editing T-DNA, wherein the control plant editing T-DNA comprises in operable linkage from a right border to a left border orientation, a Cas endonuclease expression cassette, wherein the Cas endonuclease expression cassette comprises a regulatory element operably linked to a Cas endonuclease and a guide RNA expression cassette wherein, the guide RNA expression cassette comprises a regulatory element operably linked to a polynucleotide encoding a guide RNA, wherein the guide RNA and the Cas endonuclease are capable of forming a complex that enables the Cas endonuclease to cleavage at the target site is provided. In an aspect, the method further comprising a trait of interest or a nucleotide modification template cassette, wherein the trait of interest or nucleotide modification template cassette comprises at least one nucleotide modification of the trait of interest or nucleotide and the trait of interest or nucleotide modification template cassette is capable of making at the least one nucleotide modification at the target site of the trait of interest or the nucleotide. In an aspect, the method further comprising a modification template cassette, wherein the modification template cassette comprises at least one nucleotide modification of a FAD2 genomic sequence in the plant genome, a FAD3 genomic sequence in the plant genome, or a combination thereof and the modification template cassette enables the at least one nucleotide modification of the FAD2 genomic sequence in the plant genome, the FAD3 genomic sequence in the plant genome, or the combination thereof. In an aspect, the target site is selected from the group consisting of a promoter sequence, a terminator sequence, a regulatory element sequence, a coding sequence, a splice site, a polyubiquitination site, an intron site, an intron enhancing motif, a gene of interest, and a trait of interest. In an aspect, the target site is selected from the group consisting of a polynucleotide encoding selectable marker resistance, disease resistance, drought tolerance, heat tolerance, cold tolerance, salinity tolerance, metal tolerance, herbicide tolerance, improved water use efficiency, improved nitrogen utilization, improved nitrogen fixation, pest resistance, herbivore resistance, pathogen resistance, yield improvement, health enhancement, vigor improvement, growth improvement, photosynthetic capability improvement, nutrition enhancement, altered protein composition, altered oil composition, increased biomass, increased shoot length, increased root length, improved root architecture, modulation of a metabolite, modulation of the proteome, increased seed weight, altered seed carbohydrate composition, altered seed oil composition, altered fatty acid profile, altered seed protein composition, altered seed nutrient composition, improved fertility, improved fecundity, improved environmental tolerance, improved vigor, improved disease resistance, improved disease tolerance, improved tolerance to a heterologous molecule, improved fitness, improved physical characteristic, greater mass, increased production of a biochemical molecule, decreased production of a biochemical molecule, upregulation of a gene, downregulation of a gene, upregulation of a biochemical pathway, downregulation of a biochemical pathway, stimulation of cell reproduction, and suppression of cell reproduction. In an aspect, the polynucleotide encodes an altered fatty acid profile. In an aspect, the plant is a monocot or a dicot. In as aspect, the monocot is selected from the group consisting of maize, rice, sorghum, rye, barley, wheat, millet, oats, sugarcane, turfgrass, and switchgrass. In an aspect, the dicot is selected from the group consisting of soybean, canola, alfalfa, sunflower, cotton, tobacco, peanut, potato, tobacco, Arabidopsis, and safflower. In an aspect, the editing T-DNA provided to the plant cell is provided via Agrobacterium-mediated transformation. In an aspect, the editing T-DNA provided to the plant cell is provided via Ochrobactrum-mediated transformation. In an aspect, the editing T-DNA provided to the plant cell is provided via Rhizobiaceae-mediated transformation. In an aspect, the guide RNA is operably linked to a plant U6 polymerase III promoter. In an aspect, the Cas endonuclease is a plant optimized Cas9 endonuclease. In an aspect, the Cas endonuclease gene is operably linked to a nuclear targeting signal upstream of the Cas coding region and a nuclear localization signal downstream of the Cas coding region. In an aspect, the target site is located in the gene sequence of a FAD2 gene, a FAD3 gene, or a combination thereof. In an aspect, a plant, plant cell, or seed produced by the methods provided herein. In an aspect, a plant comprising an edited trait of interest, wherein the plant originates from a plant cell comprising an edited trait of interest produced by the methods provided herein. In an aspect, wherein the editing T-DNA further comprises a selectable marker expression cassette, a color marker expression cassette, or a combination thereof. In an aspect, the Cas endonuclease is expressed by SEQ ID NO:1.

[0011] In an aspect, a recombinant DNA construct for increasing editing comprising an editing T-DNA for a trait or polynucleotide of interest, wherein the editing T-DNA comprises in operable linkage from a right border to a left border orientation, a guide RNA expression cassette, wherein the guide RNA expression cassette comprises a regulatory element operably linked to a polynucleotide encoding a guide RNA, wherein the guide RNA is complementary to the trait or polynucleotide of interest and a Cas endonuclease expression cassette, wherein the Cas endonuclease expression cassette comprises a regulatory element operably linked to a Cas endonuclease, wherein the guide RNA and the Cas endonuclease are capable of forming a complex that enables the Cas endonuclease cleavage in the trait or polynucleotide of interest is provided. In an aspect, the recombinant DNA construct further comprising a trait or polynucleotide of interest modification template cassette, wherein the trait or polynucleotide of interest modification template cassette comprises at least one nucleotide modification of the trait or polynucleotide of interest and the trait or polynucleotide of interest modification template cassette is capable of making at the least one nucleotide modification in the trait or polynucleotide of interest. In an aspect, the recombinant DNA construct further comprises a selectable marker expression cassette, a color marker expression cassette, or a combination thereof.

[0012] In an aspect, a plant comprising a modified nucleotide sequence, wherein the modified nucleotide sequence was produced by providing to a plant cell an editing T-DNA, wherein the editing T-DNA comprises in operable linkage from a right border to a left border orientation, a guide RNA expression cassette wherein, the guide RNA expression cassette comprises a regulatory element operably linked to a polynucleotide encoding a guide RNA, wherein the guide RNA is complementary the nucleotide sequence and a Cas endonuclease expression cassette, wherein the Cas endonuclease expression cassette comprises a regulatory element operably linked to a Cas endonuclease, wherein the guide RNA and the Cas endonuclease are capable of forming a complex that enables the Cas endonuclease to introduce cleavage in the nucleotide sequence is provided. In an aspect, the editing T-DNA further comprises a nucleotide modification template cassette, wherein the nucleotide modification template cassette comprises at least one nucleotide modification of the nucleotide sequence and the nucleotide modification template cassette is capable of making at the least one nucleotide modification in the nucleotide sequence.

[0013] In an aspect, a plant comprising a modified nucleotide sequence, wherein the modified nucleotide sequence was produced by providing to a plant cell an editing T-DNA, wherein the editing T-DNA comprises in operable linkage from a right border to a left border orientation, a guide RNA expression cassette wherein, the guide RNA expression cassette comprises a regulatory element operably linked to a polynucleotide encoding a guide RNA, wherein the guide RNA is complementary a FAD2 genomic sequence in the plant genome, a FAD3 genomic sequence in the plant genome, or a combination thereof and a Cas endonuclease expression cassette, wherein the Cas endonuclease expression cassette comprises a regulatory element operably linked to a Cas endonuclease, wherein the guide RNA and the Cas endonuclease are capable of forming a complex that enables the Cas endonuclease to introduce cleavage in the FAD2 genomic sequence in the plant genome, the FAD3 genomic sequence in the plant genome, or a combination thereof is provided. In an aspect, the editing T-DNA further comprises a polynucleotide modification template cassette, wherein the polynucleotide modification template cassette comprises at least one nucleotide modification of a FAD2 genomic sequence in the plant genome, a FAD3 genomic sequence in the plant genome, or a combination thereof, and the polynucleotide modification template cassette enables the at least one nucleotide modification of the FAD2 genomic sequence in the plant genome, the FAD3 genomic sequence in the plant genome, or the combination thereof.

[0014] In an aspect, the plant is a monocot or a dicot. In an aspect, the monocot is selected from the group consisting of maize, rice, sorghum, rye, barley, wheat, millet, oats, sugarcane, turfgrass, and switchgrass. In an aspect, the dicot is selected from the group consisting of soybean, canola, alfalfa, sunflower, cotton, tobacco, peanut, potato, tobacco, Arabidopsis, and safflower.

### DESCRIPTION OF THE FIGURES

[0015] The disclosure can be more fully understood from the following detailed description and the accompanying drawings and Sequence Listing that form a part of this application, which are incorporated herein by reference.

[0016] FIG. 1A shows a synthetic construct comprising editing components of binary vector RV019927 as described herein, for soybean transformation.

[0017] FIG. 1B shows a synthetic construct comprising editing components of binary vector RV019928 as described herein, for soybean transformation.

[0018] FIG. 1C shows a synthetic construct comprising editing components of binary vector RV019929 as described herein, for soybean transformation.

[0019] FIG. 1D shows a synthetic construct comprising editing components of binary vector RV019930 as described herein, for soybean transformation.

[0020] FIG. 2 shows gene editing efficiency with different binary vectors RV019927, RV019928, RV019929, and RV019930.

[0021] FIG. 3A shows the edits made to the FAD2-1A coding sequence as described herein, such as the RV019927 experiment.

[0022] FIG. 3B shows the edits made to the FAD2-1B coding sequence as described herein, such as the RV019927 experiment.

[0023] FIG. 4A shows the edits made to the FAD2-1A coding sequence as described herein, such as the RV019929 experiment.

[0024] FIG. 4B shows the edits made to the FAD2-1B coding sequence as described herein, such as the RV019929 experiment.

[0025] FIG. 5A shows the edits made to the FAD3a coding sequence as described herein, such as the RV019929 experiment.

[0026] FIG. 5B shows the edits made to the FAD3b coding sequence as described herein, such as the RV019929 experiment.

[0027] FIG. 6 depicts one example of a plurality of target site (TS) polynucleotide sequences flanking the donor DNA cassette. “POI” stands for “polynucleotide of interest”, which in some examples encoded a trait of interest, for example a trait of agronomic importance or interest.

[0028] FIG. 7 depicts schematic illustrations of different vectors and experimental strategies for the soybean HDR experiments. FIG. 7A depicts the experimental strategy for Vector 9. FIG. 7B depicts the experimental strategy for Vector 10. FIG. 7C depicts the experimental strategy for Vector 11. FIG. 7D depicts the experimental strategy for Vector 12. FIG. 7E depicts the experimental strategy for Vector 13. FIG. 7F depicts the experimental strategy for Vector 14. FIG. 7G depicts the experimental strategy for Vector 15. FIG. 7H depicts the experimental strategy for Vector 16. FIG. 7I depicts the experimental strategy for Vector 17.

[0029] FIG. 8 depicts soy transformation Vector 9 (SEQ ID NO:97), corresponding to the schematic of FIG. 7A.

[0030] FIG. 9 depicts soy transformation Vector 10 (SEQ ID NO:98), corresponding to the schematic of FIG. 7B.

[0031] FIG. 10 depicts soy transformation Vector 11 (SEQ ID NO:99), corresponding to the schematic of FIG. 7C.

[0032] FIG. 11 depicts soy transformation Vector 12 (SEQ ID NO:100), corresponding to the schematic of FIG. 7D.

[0033] FIG. 12 depicts soy transformation Vector 13 (SEQ ID NO:101), corresponding to the schematic of FIG. 7E.

[0034] FIG. 13 depicts soy transformation Vector 14 (SEQ ID NO:102), corresponding to the schematic of FIG. 7F.

[0035] FIG. 14 depicts soy transformation Vector 15 (SEQ ID NO:103), corresponding to the schematic of FIG. 7G.

[0036] FIG. 15 depicts soy transformation Vector 16 (SEQ ID NO:104), corresponding to the schematic of FIG. 7H.

[0037] FIG. 16 depicts soy transformation Vector 17 (SEQ ID NO:105), corresponding to the schematic of FIG. 7I.

[0038] FIG. 17 shows the vector design and experimental strategy and results for the soy HDR experiments for Vector 9. FIG. 17A depicts the vector design and experimental strategy. FIG. 17B shows the individual read results for the samples. FIG. 17C shows the normalized concentration of HDR copy reads.

[0039] FIG. 18 shows the vector design and experimental strategy and results for the soy HDR experiments for Vector 10. FIG. 18A depicts the vector design and experimental strategy. FIG. 18B shows the individual read results for the samples. FIG. 18C shows the normalized concentration of HDR copy reads.

[0040] FIG. 19 shows the vector design and experimental strategy and results for the soy SDN2 experiments for Vector 13. FIG. 19A depicts the vector design and experimental strategy. FIG. 19B shows the wild type soy target sequence (SEQ ID NO:106) and the donor DNA sequence for gRNA2 (SEQ ID NO:107). FIGS. 19C and 19D show sequencing verification of edits.

[0041] FIG. 20 shows the vector schematic and experimental strategy for the soy HDR experiments for Vector 12.

[0042] FIG. 21 shows the results for three reps of two different germplasm lines for Vector 14.

[0043] FIG. 22 shows the results for three reps of two different germplasm lines for Vector 15.

### DETAILED DESCRIPTION

[0044] The sequence descriptions (Table 1) summarize the Sequence Listing attached hereto, which is hereby incorporated by reference. The Sequence Listing contains one letter codes for nucleotide sequence characters and the single and three letter codes for amino acids as defined in the IUPAC-IUB standards described in Nucleic Acids Research 13:3021-3030 (1985) and in the Biochemical Journal 219(2):345-373 (1984).

TABLE 1
Sequence Listing Description

| SEQ ID NO: | Description |
|---|---|
| SEQ ID NO: 1 | Nucleotide sequence of soybean codon optimized Cas9 |
| SEQ ID NO: 2 | Amino acid sequence of the AT-NLS nuclear localization signal |
| SEQ ID NO: 3 | Amino acid sequence of the VirD2 nuclear localization signal |
| SEQ ID NO: 4 | Nucleotide sequence of soybean constitutive promoter GM-EF1A2 |
| SEQ ID NO: 5 | Nucleotide sequence of soybean GM-U6-13.1 promoter |
| SEQ ID NO: 6 | Nucleotide sequence of soybean GM-U6-9.1 promoter |
| SEQ ID NO: 7 | Nucleotide sequence of GM-FAD2-1 CR1 |
| SEQ ID NO: 8 | Nucleotide sequence of GM-FAD3-CR2 |
| SEQ ID NO: 9 | Nucleotide sequence of RV019927 construct |
| SEQ ID NO: 10 | Nucleotide sequence of RV019929 construct |
| SEQ ID NO: 11 | Nucleotide sequence of FAD2-F1 primer |
| SEQ ID NO: 12 | Nucleotide sequence of FAD2-R1 primer |
| SEQ ID NO: 13 | Nucleotide sequence of FAD2-T1 probe |
| SEQ ID NO: 14 | Nucleotide sequence of FAD2-F2 primer |
| SEQ ID NO: 15 | Nucleotide sequence of FAD2-T2 probe |
| SEQ ID NO: 16 | Nucleotide sequence of FAD3-F1 primer |
| SEQ ID NO: 17 | Nucleotide sequence of FAD3-R2 primer |
| SEQ ID NO: 18 | Nucleotide sequence of FAD3-T2 probe |
| SEQ ID NO: 19 | Nucleotide sequence of FAD3-F2 primer |
| SEQ ID NO: 20 | Nucleotide sequence of SIP-130F primer |
| SEQ ID NO: 21 | Nucleotide sequence of SIP-198R primer |
| SEQ ID NO: 22 | Nucleotide sequence of SIP-170T probe |
| SEQ ID NO: 23 | Nucleotide sequence of PCR primer WOL1007 |
| SEQ ID NO: 24 | Nucleotide sequence of PCR primer WOL1008 |
| SEQ ID NO: 25 | Nucleotide sequence of PCR primer WOL1009 |
| SEQ ID NO: 26 | Nucleotide sequence of PCR primer WOL1100 |
| SEQ ID NO: 27 | Nucleotide sequence of PCR primer WOL1101 |
| SEQ ID NO: 28 | Nucleotide sequence of PCR primer WOL1102 |
| SEQ ID NO: 29 | Nucleotide sequence of PCR primer WOL1103 |
| SEQ ID NO: 30 | Nucleotide sequence of RV005393 construct |
| SEQ ID NO: 31 | Nucleotide sequence of RV019928 construct |
| SEQ ID NO: 32 | Nucleotide sequence of RV019930 construct |
| SEQ ID NO: 33 | Nucleotide sequence of FAD2-1A WT allele near GM-FAD2-1 |
| | CR1 site RV019927 experiment |
| SEQ ID NO: 34 | Nucleotide sequence of FAD2-1A edited allele of the 1.1 variant |
| | near GM-FAD2-1 CR1 site RV019927 experiment |
| SEQ ID NO: 35 | Nucleotide sequence of FAD2-1A edited allele of the 1.2 variant |
| | near GM-FAD2-1 CR1 site RV019927 experiment |
| SEQ ID NO: 36 | Nucleotide sequence of FAD2-1A edited allele of the 1.3 variant |
| | near GM-FAD2-1 CR1 site RV019927 experiment |
| SEQ ID NO: 37 | Nucleotide sequence of FAD2-1A edited allele of the 1.4 variant |
| | near GM-FAD2-1 CR1 site RV019927 experiment |
| SEQ ID NO: 38 | Nucleotide sequence of FAD2-1A edited allele of the 1.5 variant |
| | near GM-FAD2-1 CR1 site RV019927 experiment |
| SEQ ID NO: 39 | Nucleotide sequence of FAD2-1A edited allele of the 1.6 variant |
| | near GM-FAD2-1 CR1 site RV019927 experiment |
| SEQ ID NO: 40 | Nucleotide sequence of FAD2-1A edited allele of the 1.7 variant |
| | near GM-FAD2-1 CR1 site RV019927 experiment |
| SEQ ID NO: 41 | Nucleotide sequence of FAD2-1A edited allele of the 1.8 variant |
| | near GM-FAD2-1 CR1 site RV019927 experiment |
| SEQ ID NO: 42 | Nucleotide sequence of FAD2-1B WT allele near GM-FAD2-1 |
| | CR1 site RV019927 experiment |
| SEQ ID NO: 43 | Nucleotide sequence of FAD2-1B edited allele of the 1.1 variant |
| | near GM-FAD2-1 CR1 site RV019927 experiment |
| SEQ ID NO: 44 | Nucleotide sequence of FAD2-1B edited allele of the 1.2 variant |
| | near GM-FAD2-1 CR1 site RV019927 experiment |
| SEQ ID NO: 45 | Nucleotide sequence of FAD2-1B edited allele of the 1.3 variant |
| | near GM-FAD2-1 CR1 site RV019927 experiment |
| SEQ ID NO: 46 | Nucleotide sequence of FAD2-1B edited allele of the 1.4 variant |
| | near GM-FAD2-1 CR1 site RV019927 experiment |
| SEQ ID NO: 47 | Nucleotide sequence of FAD2-1B edited allele of the 1.5 variant |
| | near GM-FAD2-1 CR1 site RV019927 experiment |
| SEQ ID NO: 48 | Nucleotide sequence of FAD2-1B edited allele of the 1.6 variant |
| | near GM-FAD2-1 CR1 site RV019927 experiment |
| SEQ ID NO: 49 | Nucleotide sequence of FAD2-1B edited allele of the 1.7 variant |
| | near GM-FAD2-1 CR1 site RV019927 experiment |
| SEQ ID NO: 50 | Nucleotide sequence of FAD2-1B edited allele of the 1.8 variant |
| | near GM-FAD2-1 CR1 site RV019927 experiment |
| SEQ ID NO: 51 | Nucleotide sequence of FAD2-1A WT allele near GM-FAD2-1 |
| | CR1 site RV019929 experiment |
| SEQ ID NO: 52 | Nucleotide sequence of FAD2-1A edited allele of the 1.1 variant |
| | near GM-FAD2-1 CR1 site RV019929 experiment |
| SEQ ID NO: 53 | Nucleotide sequence of FAD2-1A edited allele of the 1.2 variant |
| | near GM-FAD2-1 CR1 site RV019929 experiment |
| SEQ ID NO: 54 | Nucleotide sequence of FAD2-1A edited allele of the 1.3 variant |
| | near GM-FAD2-1 CR1 site RV019929 experiment |
| SEQ ID NO: 55 | Nucleotide sequence of FAD2-1A edited allele of the 1.4 variant |
| | near GM-FAD2-1 CR1 site RV019929 experiment |
| SEQ ID NO: 56 | Nucleotide sequence of FAD2-1A edited allele of the 1.5 variant |
| | near GM-FAD2-1 CR1 site RV019929 experiment |
| SEQ ID NO: 57 | Nucleotide sequence of FAD2-1A edited allele of the 1.6 variant |
| | near GM-FAD2-1 CR1 site RV019929 experiment |
| SEQ ID NO: 58 | Nucleotide sequence of FAD2-1A edited allele of the 1.7 variant |
| | near GM-FAD2-1 CR1 site RV019929 experiment |
| SEQ ID NO: 59 | Nucleotide sequence of FAD2-1A edited allele of the 1.8 variant |
| | near GM-FAD2-1 CR1 site RV019929 experiment |
| SEQ ID NO: 60 | Nucleotide sequence of FAD2-1B WT allele near GM-FAD2-1 |
| | CR1 site RV019929 experiment |
| SEQ ID NO: 61 | Nucleotide sequence of FAD2-1B edited allele of the 1.1 variant |
| | near GM-FAD2-1 CR1 site RV019929 experiment |
| SEQ ID NO: 62 | Nucleotide sequence of FAD2-1B edited allele of the 1.2 variant |
| | near GM-FAD2-1 CR1 site RV019929 experiment |
| SEQ ID NO: 63 | Nucleotide sequence of FAD2-1B edited allele of the 1.3 variant |
| | near GM-FAD2-1 CR1 site RV019929 experiment |
| SEQ ID NO: 64 | Nucleotide sequence of FAD2-1B edited allele of the 1.4 variant |
| | near GM-FAD2-1 CR1 site RV019929 experiment |
| SEQ ID NO: 65 | Nucleotide sequence of FAD2-1B edited allele of the 1.5 variant |
| | near GM-FAD2-1 CR1 site RV019929 experiment |
| SEQ ID NO: 66 | Nucleotide sequence of FAD2-1B edited allele of the 1.6 variant |
| | near GM-FAD2-1 CR1 site RV019929 experiment |
| SEQ ID NO: 67 | Nucleotide sequence of FAD2-1B edited allele of the 1.7 variant |
| | near GM-FAD2-1 CR1 site RV019929 experiment |
| SEQ ID NO: 68 | Nucleotide sequence of FAD2-1B edited allele of the 1.8 variant |
| | near GM-FAD2-1 CR1 site RV019929 experiment |
| SEQ ID NO: 69 | Nucleotide sequence of FAD3a WT allele near GM-FAD3 CR2 |
| | site RV019929 experiment |
| SEQ ID NO: 70 | Nucleotide sequence of FAD3a edited allele of the 1.1 variant near |
| | GM-FAD3 CR2 site RV019929 experiment |
| SEQ ID NO: 71 | Nucleotide sequence of FAD3a edited allele of the 1.2 variant near |
| | GM-FAD3 CR2 site RV019929 experiment |
| SEQ ID NO: 72 | Nucleotide sequence of FAD3a edited allele of the 1.3 variant near |
| | GM-FAD3 CR2 site RV019929 experiment |
| SEQ ID NO: 73 | Nucleotide sequence of FAD3a edited allele of the 1.4 variant near |
| | GM-FAD3 CR2 site RV019929 experiment |
| SEQ ID NO: 74 | Nucleotide sequence of FAD3a edited allele of the 1.5 variant near |
| | GM-FAD3 CR2 site RV019929 experiment |
| SEQ ID NO: 75 | Nucleotide sequence of FAD3a edited allele of the 1.6 variant near |
| | GM-FAD3 CR2 site RV019929 experiment |
| SEQ ID NO: 76 | Nucleotide sequence of FAD3b WT allele near GM-FAD3 CR2 |
| | site |
| SEQ ID NO: 77 | Nucleotide sequence of FAD3b edited allele of the 1.1 variant near |
| | GM-FAD3 CR2 site RV019929 experiment |
| SEQ ID NO: 78 | Nucleotide sequence of FAD3b edited allele of the 1.2 variant near |
| | GM-FAD3 CR2 site RV019929 experiment |
| SEQ ID NO: 79 | Nucleotide sequence of FAD3b edited allele of the 1.3 variant near |
| | GM-FAD3 CR2 site RV019929 experiment |
| SEQ ID NO: 80 | Nucleotide sequence of FAD3b edited allele of the 1.4 variant near |
| | GM-FAD3 CR2 site RV019929 experiment |
| SEQ ID NO: 81 | Nucleotide sequence of FAD3b edited allele of the 1.5 variant near |
| | GM-FAD3 CR2 site RV019929 experiment |
| SEQ ID NO: 82 | Nucleotide sequence of FAD3b edited allele of the 1.6 variant near |
| | GM-FAD3 CR2 site RV019929 experiment |
| SEQ ID NO: 83 | Nucleotide sequence of FAD3b edited allele of the 1.7 variant near |
| | GM-FAD3 CR2 site RV019929 experiment |
| SEQ ID NO: 84 | Nucleotide sequence of FAD3b edited allele of the 1.8 variant near |
| | GM-FAD3 CR2 site RV019929 experiment |
| SEQ ID NO: 85 | Nucleotide sequence of soybean FAD2-1A gene. |
| SEQ ID NO: 86 | Nucleotide sequence of soybean FAD2-1B gene |
| SEQ ID NO: 87 | Nucleotide sequence of soybean FAD3a gene |
| SEQ ID NO: 88 | Nucleotide sequence of soybean FAD3b gene |
| SEQ ID NO: 89 | Nucleotide sequence of soybean FAD2-1A coding sequence (CDS) |
| SEQ ID NO: 90 | Amino acid sequence of soybean FAD2-1A gene |
| SEQ ID NO: 91 | Nucleotide sequence of soybean FAD2-1B coding sequence (CDS) |
| SEQ ID NO: 92 | Amino acid sequence of soybean FAD2-1B gene |
| SEQ ID NO: 93 | Nucleotide sequence of soybean FAD3a coding sequence (CDS) |
| SEQ ID NO: 94 | Amino acid sequence of soybean FAD3a gene |
| SEQ ID NO: 95 | Nucleotide sequence of soybean FAD3b coding sequence (CDS) |
| SEQ ID NO: 96 | Amino acid sequence of soybean FAD3b gene |
| SEQ ID NO: 97 | Nucleotide sequence of Vector 9 |
| SEQ ID NO: 98 | Nucleotide sequence of Vector 10 |
| SEQ ID NO: 99 | Nucleotide sequence of Vector 11 |
| SEQ ID NO: 100 | Nucleotide sequence of Vector 12 |
| SEQ ID NO: 101 | Nucleotide sequence of Vector 13 |
| SEQ ID NO: 102 | Nucleotide sequence of Vector 14 |
| SEQ ID NO: 103 | Nucleotide sequence of Vector 15 |
| SEQ ID NO: 104 | Nucleotide sequence of Vector 16 |
| SEQ ID NO: 105 | Nucleotide sequence of Vector 17 |
| SEQ ID NO: 106 | Artificial DNA sequence depicted in FIG. 19B for the WT soy |
| | sequence (SEQ ID NO: 106) |
| SEQ ID NO: 107 | Artificial DNA sequence depicted in FIG. 19B for the donor DNA |
| | for gRNA2 (SEQ ID NO: 107) |
| SEQ ID NO: 108 | Nucleotide sequence of PHP70365; pVIR8 |

[0045] In an aspect, compositions and methods related to improving the editing of endogenous and previously-introduced heterologous polynucleotides and for improving the frequency and efficiency of homology-directed repair of double-strand-break sites are provided. In an aspect, plants, such as soybean plants, have been modified using genomic editing techniques disclosed herein to provide an improved editing efficiency of endogenous and previously-introduced heterologous polynucleotides and an improved frequency and efficiency of homology-directed repair of double-strand-break sites are provided. In an aspect, the present disclosure found that modifying targeted DNA breaks at genomic loci of a plant using genomic editing technology, including the editing T-DNA as described herein provided improved editing of endogenous and previously-introduced heterologous polynucleotides and improved the frequency and efficiency of homology-directed repair of double-strand-break sites. In an aspect, the editing T-DNA comprises a gRNA cassette near the right border and placed upstream of a Cas endonuclease expression cassette in a binary vector transformation system. In an aspect, the binary vector transformation system comprising the editing T-DNA is delivered to a soybean plant cell by Ochrobactrum-mediated transformation.

[0046] In an aspect, modified seeds, such as soybean seeds, are provided with increased levels of oleic acid and decreased levels of linolenic acid. The soybeans described herein may further contain one or more of decreased levels of saturated fatty acids, such as one or more of palmitic and stearic acids, and decreased levels of linoleic acid.

[0047] Oils produced from seeds described herein may contain low levels of saturated fatty acids which are desirable in providing a healthy diet. Fats that are solid at room temperature can be used in applications such as the production of non-dairy margarines and spreads, and various applications in confections and in baking. Provided are oils and triglycerides for solid fat applications which may contain a predominance of the very high melting, long chain fatty acid stearic acid and a balance of monounsaturated fatty acid with very little polyunsaturated fat. Solid fat fractions having a triacylglyceride structure with saturated fatty acids occupying the sn-1 and sn-3 positions of the triglycerides and an unsaturated fatty acid at the sn-2 position are provided. This overall fatty acid composition and triglyceride structure confers an optimal solid fat crystal structure and a maximum melting point with minimal saturated fatty acid content.

[0048] The modified plants, seeds and oil compositions disclosed herein are produced by genomic editing techniques which facilitate the improved editing of the FAD2-1A, FAD-2-1B, FAD3a and FAD3b alleles. The sense strand or the complement thereof may be edited.

[0049] A “FAD2”, “FAD2-1”, “FAD2-1A” or FAD2-1B″ or a “FAD2-modified plant”, “FAD2-1-modified plant”, “FAD2-1A-modified plant” or “FAD2-1B modified plant” generally refers to a modified plant or mutant plant that has one or more nucleotide changes in a genomic region that encodes a FAD2, FAD2-1, FAD2-1A or FAD2-1B polypeptide. A “FAD3”, “FAD3a”, “FAD3b”, “FAD3-modified plant”, “FAD3a-modified plant” or a “FAD3b-modified plant generally refers to a modified plant or mutant plant that has one or more nucleotide changes in a genomic region that encodes a FAD3, FAD3a, FAD3b polypeptide. The nucleotide changes in the genomic regions of FAD2, FAD2-1, FAD2-1A or FAD2-1B and/or FAD3, FAD3a, FAD3b can include modifications that result in one or more of SEQ ID NOs: 34-41, 43-50, 52-59, 61-68, 70-75 and 77-84 being contained within the genomic region.

[0050] In some aspects, the polynucleotides disclosed herein may be isolated polynucleotides. An “isolated polynucleotide” generally refers to a polymer of ribonucleotides (RNA) or deoxyribonucleotides (DNA) that is single- or double-stranded, optionally containing synthetic, non-natural or altered nucleotide bases. An isolated polynucleotide in the form of DNA may be comprised of one or more segments of cDNA, genomic DNA or synthetic DNA.

[0051] The terms “polynucleotide”, “polynucleotide sequence”, “nucleic acid sequence”, “nucleic acid fragment”, and “isolated nucleic acid fragment” are used interchangeably herein. These terms encompass nucleotide sequences and the like. A polynucleotide may be a polymer of RNA or DNA that is single- or double-stranded, that optionally contains synthetic, non-natural or altered nucleotide bases. A polynucleotide in the form of a polymer of DNA may be comprised of one or more segments of cDNA, genomic DNA, synthetic DNA, or mixtures thereof. Nucleotides (usually found in their 5′-monophosphate form) are referred to by a single letter designation as follows: “A” for adenylate or deoxyadenylate (for RNA or DNA, respectively), “C” for cytidylate or deoxycytidylate, “G” for guanylate or deoxyguanylate, “U” for uridylate, “T” for deoxythymidylate, “R” for purines (A or G), “Y” for pyrimidines (C or T), “K” for G or T, “H” for A or C or T, “I” for inosine, and “N” for any nucleotide.

[0052] A regulatory element generally refers to a transcriptional regulatory element involved in regulating the transcription of a nucleic acid molecule such as a gene or a target gene. The regulatory element is a nucleic acid and may include a promoter, an enhancer, an intron, a 5′-untranslated region (5′-UTR, also known as a leader sequence), or a 3′-UTR or a combination thereof. A regulatory element may act in “cis” or “trans”, and generally it acts in “cis”, i.e. it activates expression of genes located on the same nucleic acid molecule, e.g. a chromosome, where the regulatory element is located. The nucleic acid molecule regulated by a regulatory element does not necessarily have to encode a functional peptide or polypeptide, e.g., the regulatory element can modulate the expression of a short interfering RNA or an anti-sense RNA.

[0053] An enhancer element is any nucleic acid molecule that increases transcription of a nucleic acid molecule when functionally linked to a promoter regardless of its relative position. An enhancer may be an innate element of the promoter or a heterologous element inserted to enhance the level or tissue-specificity of a promoter.

[0054] A repressor (also sometimes called herein silencer) is defined as any nucleic acid molecule which inhibits the transcription when functionally linked to a promoter regardless of relative position.

[0055] Promotors which may be useful in the methods and compositions provided include those containing cis elements, promoters functional in a plant cell, tissue specific and tissue-preferred promotors, developmentally regulated promoters and constitutive promoters. “Promoter” generally refers to a nucleic acid fragment capable of controlling transcription of another nucleic acid fragment. A promoter generally includes a core promoter (also known as minimal promoter) sequence that includes a minimal regulatory region to initiate transcription, that is a transcription start site.

[0056] The term “cis-element” generally refers to transcriptional regulatory element that affects or modulates expression of an operably linked transcribable polynucleotide, where the transcribable polynucleotide is present in the same DNA sequence. A cis-element may function to bind transcription factors, which are trans-acting polypeptides that regulate transcription.

[0057] “Promoter functional in a plant” is a promoter capable of initiating transcription in plant cells whether or not its origin is from a plant cell.

[0058] “Tissue-specific promoter” and “tissue-preferred promoter” are used interchangeably to refer to a promoter that is expressed predominantly but not necessarily exclusively in one tissue or organ, but that may also be expressed in one specific cell.

[0059] “Developmentally regulated promoter” generally refers to a promoter whose activity is determined by developmental events.

[0060] “Constitutive promoter” generally refers to promoters active in all or most tissues or cell types of a plant at all or most developing stages. As with other promoters classified as “constitutive” (e.g. ubiquitin), some variation in absolute levels of expression can exist among different tissues or stages. The term “constitutive promoter” or “tissue-independent” are used interchangeably herein.

[0061] Provided are sequences which are heterologous nucleotide sequences which can be used in the methods and compositions disclosed herein. A “heterologous nucleotide sequence” generally refers to a sequence that is not naturally occurring with the sequence of the disclosure. While this nucleotide sequence is heterologous to the sequence, it may be homologous, or native, or heterologous, or foreign, to the plant host. However, it is recognized that the instant sequences may be used with their native coding sequences to increase or decrease expression resulting in a change in phenotype in the transformed seed. The terms “heterologous nucleotide sequence”, “heterologous sequence”, “heterologous nucleic acid fragment”, and “heterologous nucleic acid sequence” are used interchangeably herein.

[0062] The polynucleotide sequence of the targets of the present disclosure (e.g., SEQ ID NOS: 85-88) and the coding sequences SEQ ID NO: 89, 91, 93, or 95, encoding the polypeptides 90, 92, 94 or 96 respectively, may be modified or altered to reduce their expression or the characteristics of the protein. Examples of such modifications are one or more of the sequences listed in Table 1. As one of ordinary skill in the art will appreciate, modification or alteration can also be made without substantially affecting the gene expression function. The methods are well known to those of skill in the art. Sequences can be modified, for example by insertion, deletion, or replacement of template sequences through any modification approach. The genomic sequences contain introns and exons which may be targeted according to the methods disclosed herein.

[0063] SEQ ID NO: 85 (soybean FAD2-1A gene) has the start codon at position 1-3 and the stop codon at position 1329-1331, exon1 is from positions 1-3, intron1 is from positions 4-170, exon2 is from positions 171-1331.

[0064] SEQ ID NO: 86 (soybean FAD2-1B gene) has the start codon at position 1-3 and the stop codon at position 1322-1324, exon1 is from positions 1-3, intron1 is from positions 4-163, exon2 is from positions 164-1324.

[0065] SEQ ID NO: 87 (soybean FAD3a gene) has the start codon at position 1-3 and the stop codon at position 3866-3868, exon1 is from positions 1-293, intron1 is from positions 294-460, exon2 is from positions 461-550, intron2 is from positions 551-874, exon3 is from positions 875-941, intron3 is from positions 942-1076, exon4 is from positions 1077-1169, intron4 is from positions 1170-1278, exon5 is from positions 1279-1464, intron5 is from positions 1465-1756, exon6 is from positions 1757-1837, intron6 is from positions 1838-2874, exon7 is from positions 2875-3012, intron1 is from positions 3013-3685, exon8 is from positions 3686-3868.

[0066] SEQ ID NO: 88 (soybean FAD3b gene) has the start codon at position 1-3 and the stop codon at position 3894-3896, exon1 is from positions 1-305, intron1 is from positions 306-497, exon2 is from positions 498-587, intron2 is from positions 588-935, exon3 is from positions 936-1002, intron3 is from positions 1003-1144, exon4 is from positions 1145-1237, intron4 is from positions 1238-1335, exon5 is from positions 1336-1521, intron5 is from positions 1522-1636, exon6 is from positions 1637-1717, intron6 is from positions 1637-1717, exon7 is from positions 2950-3087, intron7 is from positions 3088-3713, exon8 is from positions 3714-3896.

[0067] Variant promotors can be used in the methods and compositions disclosed herein. A “variant promoter” as used herein, is the sequence of the promoter or the sequence of a functional fragment of a promoter containing changes in which one or more nucleotides of the original sequence is deleted, added, and/or substituted, while substantially maintaining promoter function. One or more base pairs can be inserted, deleted, or substituted internally to a promoter. In the case of a promoter fragment, variant promoters can include changes affecting the transcription of a minimal promoter to which it is operably linked. Variant promoters can be produced, for example, by standard DNA mutagenesis techniques or by chemically synthesizing the variant promoter or a portion thereof.

[0068] Provided are sequences that are a full complement or a full-length complement of those disclosed herein, such as the nucleotide sequences in Table 1. The terms “full complement” and “full-length complement” are used interchangeably herein, and refer to a complement of a given nucleotide sequence, wherein the complement and the nucleotide sequence consist of the same number of nucleotides and are 100% complementary.

[0069] Provided are sequences that are “substantially similar” or “corresponding substantially” to those disclosed herein which can be used in the methods and compositions described herein. The terms “substantially similar” and “corresponding substantially” as used herein refer to nucleic acid fragments wherein changes in one or more nucleotide bases do not affect the ability of the nucleic acid fragment to mediate gene expression or produce a certain phenotype. These terms also refer to modifications of the nucleic acid fragments of the instant disclosure such as deletion or insertion of one or more nucleotides that do not substantially alter the functional properties of the resulting nucleic acid fragment relative to the initial, unmodified fragment. It is therefore understood, as those skilled in the art will appreciate, that the disclosure encompasses more than the specific exemplary sequences.

[0070] Provided are compositions and methods that includes materials, steps, features, components, or elements that consist essentially of a particular component. The transitional phrase “consisting essentially of” generally refers to a composition, method that includes materials, steps, features, components, or elements, in addition to those literally disclosed, provided that these additional materials, steps, features, components, or elements do not materially affect the basic and novel characteristic(s) of the claimed subject matter, e.g., one or more of the claimed sequences.

[0071] Moreover, the skilled artisan recognizes that substantially similar nucleic acid sequences encompassed by this disclosure are also defined by their ability to hybridize, under moderately stringent conditions (for example, 0.5×SSC, 0.1% SDS, 60° C.) with the sequences exemplified herein, or to any portion of the nucleotide sequences reported herein and which are functionally equivalent to the promoter of the disclosure. Estimates of such homology are provided by either DNA-DNA or DNA-RNA hybridization under conditions of stringency as is well understood by those skilled in the art (Hames and Higgins, Eds.; In Nucleic Acid Hybridisation; IRL Press: Oxford, U. K., 1985). Stringency conditions can be adjusted to screen for moderately similar fragments, such as homologous sequences from distantly related organisms, to highly similar fragments, such as genes that duplicate functional enzymes from closely related organisms. Post-hybridization washes partially determine stringency conditions. One set of conditions uses a series of washes starting with 6×SSC, 0.5% SDS at room temperature for 15 min, then repeated with 2×SSC, 0.5% SDS at 45° C. for 30 min, and then repeated twice with 0.2×SSC, 0.5% SDS at 50° C. for 30 min. Another set of stringent conditions uses higher temperatures in which the washes are identical to those above except for the temperature of the final two 30 min washes in 0.2×SSC, 0.5% SDS was increased to 60° C. Another set of highly stringent conditions uses two final washes in 0.1×SSC, 0.1% SDS at 65° C.

[0072] Provided are substantially similar sequences useful in compositions and methods provided herein. A “substantially similar sequence” generally refers to variants of the disclosed sequences such as those that result from site-directed mutagenesis, as well as synthetically derived sequences. Sequence alignments and percent identity calculations may be determined using a variety of comparison methods designed to detect similar or identical sequences including, but not limited to, the Megalign® program of the LASERGENE® bioinformatics computing suite (DNASTAR® Inc., Madison, Wis.). Unless stated otherwise, multiple alignment of the sequences provided herein were performed using the Clustal V method of alignment (Higgins and Sharp (1989) CABIOS. 5:151-153) with the default parameters (GAP PENALTY=10, GAP LENGTH PENALTY=10). Default parameters for pairwise alignments and calculation of percent identity of protein sequences using the Clustal V method are KTUPLE=1, GAP PENALTY=3, WINDOW=5 and DIAGONALS SAVED=5. For nucleic acids these parameters are KTUPLE=2, GAP PENALTY=5, WINDOW=4 and DIAGONALS SAVED=4. After alignment of the sequences, using the Clustal V program, it is possible to obtain “percent identity” and “divergence” values by viewing the “sequence distances” table on the same program; unless stated otherwise, percent identities and divergences provided and claimed herein were calculated in this manner.

[0073] Alternatively, the Clustal W method of alignment may be used. The Clustal W method of alignment (described by Higgins and Sharp, CABIOS. 5:151-153 (1989); Higgins, D. G. et al., Comput. Appl. Biosci. 8:189-191 (1992)) can be found in the MegAlign™ v6.1 program of the LASERGENE® bioinformatics computing suite (DNASTAR® Inc., Madison, Wis.). Default parameters for multiple alignment correspond to GAP PENALTY=10, GAP LENGTH PENALTY=0.2, Delay Divergent Sequences=30%, DNA Transition Weight=0.5, Protein Weight Matrix=Gonnet Series, DNA Weight Matrix=IUB. For pairwise alignments the default parameters are Alignment=Slow-Accurate, Gap Penalty=10.0, Gap Length=0.10, Protein Weight Matrix=Gonnet 250 and DNA Weight Matrix=IUB. After alignment of the sequences using the Clustal W program, it is possible to obtain “percent identity” and “divergence” values by viewing the “sequence distances” table in the same program.

[0074] In an aspect, the % sequence identity is determined over the entire length of the molecule (nucleotide or amino acid). A “substantial portion” of an amino acid or nucleotide sequence comprises enough of the amino acid sequence of a polypeptide or the nucleotide sequence of a gene to afford putative identification of that polypeptide or gene, either by manual evaluation of the sequence by one skilled in the art, or by computer-automated sequence comparison and identification using algorithms such as BLAST (Altschul, S. F. et al., J. Mol. Biol. 215:403-410 (1993)) and Gapped Blast (Altschul, S. F. et al., Nucleic Acids Res. 25:3389-3402 (1997)). BLASTN generally refers to a BLAST program that compares a nucleotide query sequence against a nucleotide sequence database.

[0075] The present disclosure provides genes, mutated genes, chimeric genes and recombinant expression constructs. “Gene” includes a nucleic acid fragment that expresses a functional molecule such as, but not limited to, a specific protein, including regulatory sequences preceding (5′ non-coding sequences) and following (3′ non-coding sequences) the coding sequence. “Native gene” generally refers to a gene as found in nature with its own regulatory sequences.

[0076] A “mutated gene” is a gene that has been altered through human intervention. Such a “mutated gene” has a sequence that differs from the sequence of the corresponding non-mutated gene by at least one nucleotide addition, deletion, or substitution. In certain embodiments of the disclosure, the mutated gene comprises an alteration that results from a guide polynucleotide/Cas endonuclease system as disclosed herein. A mutated plant is a plant comprising a mutated gene.

[0077] “Chimeric gene” or “recombinant expression construct”, which are used interchangeably, includes any gene that is not a native gene, comprising regulatory and coding sequences that are not found together in nature. Accordingly, a chimeric gene may comprise regulatory sequences and coding sequences that are derived from different sources.

[0078] “Coding sequence” generally refers to a polynucleotide sequence which codes for a specific amino acid sequence. “Regulatory sequences” refer to nucleotide sequences located upstream (5′ non-coding sequences), within, or downstream (3′ non-coding sequences) of a coding sequence, and which influence the transcription, RNA processing or stability, or translation of the associated coding sequence. Regulatory sequences may include, but are not limited to, promoters, translation leader sequences, introns, and polyadenylation recognition sequences.

[0079] The term “operably linked” or “functionally linked” generally refers to the association of nucleic acid sequences on a single nucleic acid fragment so that the function of one is affected by the other. For example, a promoter is operably linked with a coding sequence when it is capable of affecting the expression of that coding sequence (i.e., that the coding sequence is under the transcriptional control of the promoter). Coding sequences can be operably linked to regulatory sequences in sense or antisense orientation.

[0080] The terms “initiate transcription”, “initiate expression”, “drive transcription”, and “drive expression” are used interchangeably herein and all refer to the primary function of a promoter. As detailed throughout this disclosure, a promoter is a non-coding genomic DNA sequence, usually upstream (5′) to the relevant coding sequence, and its primary function is to act as a binding site for RNA polymerase and initiate transcription by the RNA polymerase. Additionally, there is “expression” of RNA, including functional RNA, or the expression of polypeptide for operably linked encoding nucleotide sequences, as the transcribed RNA ultimately is translated into the corresponding polypeptide.

[0081] The term “expression cassette” as used herein, generally refers to a discrete nucleic acid fragment into which a nucleic acid sequence or fragment can be cloned or synthesized through molecular biology techniques.

[0082] As stated herein, “suppression” includes a reduction of the level of enzyme activity or protein functionality (e.g., a phenotype associated with a protein) detectable in a transgenic plant when compared to the level of enzyme activity or protein functionality detectable in a non-transgenic or wild type plant with the native enzyme or protein. The level of enzyme activity in a plant with the native enzyme is referred to herein as “wild type” activity. The level of protein functionality in a plant with the native protein is referred to herein as “wild type” functionality. The term “suppression” includes lower, reduce, decline, decrease, inhibit, eliminate and prevent. This reduction may be due to a decrease in translation of the native mRNA into an active enzyme or functional protein. It may also be due to the transcription of the native DNA into decreased amounts of mRNA and/or to rapid degradation of the native mRNA. The term “native enzyme” generally refers to an enzyme that is produced naturally in a non-transgenic or wild type cell. The terms “non-transgenic” and “wild type” are used interchangeably herein.

[0083] “Altering expression” or “modulating expression” generally refers to the production of gene product(s) in plants in amounts or proportions that differ significantly from the amount of the gene product(s) produced by the corresponding wild-type plants (i.e., expression is increased or decreased).

[0084] “Transformation” as used herein generally refers to both stable transformation and transient transformation. In an aspect, bacterial strains useful in the methods for improving editing of endogenous and previously-introduced heterologous polynucleotides and for improving the frequency and efficiency of homology-directed repair of double-strand-break sites of the disclosure include, but are not limited to, a disarmed Agrobacteria, an Ochrobactrum bacteria or a Rhizobiaceae bacteria. In an aspect, the different bacterial strains are selected from (i) a disarmed Agrobacteria and an Ochrobactrum bacteria, (ii) a disarmed Agrobacteria and a Rhizobiaceae bacteria, and (iii) a Rhizobiaceae bacteria and an Ochrobactrum bacteria.

[0085] In an aspect, disarmed Agrobacteria useful in the present methods include, but are not limited to, AGL-1, EHA105, GV3101, LBA4404, and LBA4404 THY-.

[0086] In an aspect, Ochrobactrum bacterial strains useful in the present methods for improving editing of endogenous and previously-introduced heterologous polynucleotides and for improving the frequency and efficiency of homology-directed repair of double-strand-break sites include, but are not limited to, Ochrobactrum haywardense H1 NRRL Deposit B-67078, Ochrobactrum cytisi, Ochrobactrum daejeonense, Ochrobactrum oryzae, Ochrobactrum tritici LBNL124-A-10, HTG3-C-07, Ochrobactrum pecoris, Ochrobactrum ciceri, Ochrobactrum gallinifaecis, Ochrobactrum grignonense, Ochrobactrum guangzhouense, Ochrobactrum haematophilum, Ochrobactrum intermedium, Ochrobactrum lupini, Ochrobactrum pituitosum, Ochrobactrum pseudintermedium, Ochrobactrum pseudogrignonense, Ochrobactrum rhizosphaerae, Ochrobactrum thiophenivorans, and Ochrobactrum tritici disclosed in US Patent Publication No. 20180216123 incorporated herein by reference in its entirety.

[0087] In an aspect, Rhizobiaceae bacterial strains useful in the present methods for improving editing of endogenous and previously-introduced heterologous polynucleotides and for improving the frequency and efficiency of homology-directed repair of double-strand-break sites include, but are not limited to, Rhizobium lusitanum, Rhizobium rhizogenes, Agrobacterium rubi, Rhizobium multihospitium, Rhizobium tropici, Rhizobium miluonense, Rhizobium leguminosarum, Rhizobium leguminosarum bv. trifolii, Rhizobium leguminosarum bv. phaseoli, Rhizobium leguminosarum. bv. viciae, Rhizobium leguminosarum Madison, Rhizobium leguminosarum USDA2370, Rhizobium leguminosarum USDA2408, Rhizobium leguminosarum USDA2668, Rhizobium leguminosarum 2370G, Rhizobium leguminosarum 2370LBA, Rhizobium leguminosarum 2048G, Rhizobium leguminosarum 2048LBA, Rhizobium leguminosarum bv. phaseoli 2668G, Rhizobium leguminosarum bv. phaseoli 2668LBA, Rhizobium leguminosarum RL542C, Rhizobium etli USDA 9032, Rhizobium etli bv. phaseoli, Rhizobium endophyticum, Rhizobium tibeticum, Rhizobium etli, Rhizobium pisi, Rhizobium phaseoli, Rhizobium fabae, Rhizobium hainanense, Arthrobacter viscosus, Rhizobium alamii, Rhizobium mesosinicum, Rhizobium sullae, Rhizobium indigoferae, Rhizobium gallicum, Rhizobium yanglingense, Rhizobium mongolense, Rhizobium oryzae, Rhizobium loessense, Rhizobium tubonense, Rhizobium cellulosilyticum, Rhizobium soli, Neorhizobium galegae, Neorhizobium vignae, Neorhizobium huautlense, Neorhizobium alkalisoli, Aureimonas altamirensis, Aureimonas frigidaquae, Aureimonas ureilytica. Aurantimonas coralicida, Fulvimarina pelagi, Martelella mediterranea, Allorhizobium undicola, Allorhizobium vitis, Allorhizobium bonbon, Beijerinckia fluminensis, Agrobacterium larrymoorei, Agrobacterium radiobacter, Rhizobium selenitireducens corrig. Rhizobium rosettiformans, Rhizobium daejeonense, Rhizobium aggregatum, Pararhizobium capsulatum, Pararhizobium giardinii, Ensifer mexicanus, Ensifer tenangae, Ensifer saheli, Ensifer kostiensis, Ensifer kummerowiae, Ensifer fredii Sinorhizobium americanum, Ensifer arboris, Ensifer garamanticus, Ensifer meliloti, Ensifer numidicus, Ensifer adhaenens, Sinorhizobium sp., Sinorhizobium meliloti SD630, Sinorhizobium meliloti USDA1002, Sinorhizobium fredii USDA205, Sinorhizobium fredii SF542G, Sinorhizobium fredii SF4404, and Sinorhizobium fredii SM542C. See U.S. Pat. No. 9,365,859 incorporated herein by reference in its entirety.

[0088] In an aspect, bacteria of the class Alphaproteobacteria, order Rhizobiales useful in the present methods for improving editing of endogenous and previously-introduced heterologous polynucleotides and for improving the frequency and efficiency of homology-directed repair of double-strand-break sites include, but are not limited to, bacteria of the family Rhizobiaceae, genus Rhizobium, Chelatobacter, Sinorhizobium, and unclassified Rhizobiaceae, the family Bartonellaceae, genus Bartonella and unclassified Bartonellaceae, the family Brucellaceae, genus Brucella, Mycoplana, Ochrobactrum, and unclassified Brucellaceae, the family Phyllobacteriaceae, genus Phyllobacterium, Aminobacter, Aquamicrobium, Defluvibacter, Mesorhizobium, Pseudaminobacter, and unclassified Phyllobacteriaceae, the family Methylocystaceae, genus Methylocytis, Albibacter, Methylosinus, Terasakiella, and unclassified Methylocystaceae, the family Beijerinckiaceae, genus Beijerinckia, and unclassified Beijerinckiaceae, and the family Bradyrhizobium, genus Afipia, Blastobacter, Bosea, Nitrobacter, Rhodoblastus, Rhodopseudomonas, and unclassified Bradyrhizobiaceae.

[0089] “Stable transformation” generally refers to the introduction of a nucleic acid fragment into a genome of a host organism resulting in genetically stable inheritance. Once stably transformed, the nucleic acid fragment is stably integrated in the genome of the host organism and any subsequent generation. Host organisms containing the transformed nucleic acid fragments are referred to as “transgenic” organisms. “Transient transformation” generally refers to the introduction of a nucleic acid fragment into the nucleus, or DNA-containing organelle, of a host organism resulting in gene expression without genetically stable inheritance.

[0090] The term “introduced” means providing a nucleic acid (e.g., expression construct) or protein into a cell. Introduced includes reference to the incorporation of a nucleic acid into a eukaryotic or prokaryotic cell where the nucleic acid may be incorporated into the genome of the cell and includes reference to the transient provision of a nucleic acid or protein to the cell. Introduced includes reference to stable or transient transformation methods, as well as sexually crossing. Thus, “introduced” in the context of inserting a nucleic acid fragment (e.g., a recombinant DNA construct/expression construct) into a cell, means “transfection” or “transformation” or “transduction” and includes reference to the incorporation of a nucleic acid fragment into a eukaryotic or prokaryotic cell where the nucleic acid fragment may be incorporated into the genome of the cell (e.g., chromosome, plasmid, plastid or mitochondrial DNA), converted into an autonomous replicon, or transiently expressed (e.g., transfected mRNA).

[0091] “Genome” as it applies to plant cells encompasses not only chromosomal DNA found within the nucleus, but organelle DNA found within subcellular components (e.g., mitochondrial, plastid) of the cell.

[0092] “Genetic modification” generally refers to modification of any nucleic acid sequence or genetic element by insertion, deletion, or substitution of one or more nucleotides in an endogenous nucleotide sequence by genome editing or by insertion of a recombinant nucleic acid, e.g., as part of a vector or construct in any region of the plant genomic DNA by routine transformation techniques. Examples of modification of genetic components include, but are not limited to, promoter regions, 5′ untranslated leaders, introns, genes, 3′ untranslated regions, and other regulatory sequences or sequences that affect transcription or translation of one or more nucleic acid sequences.

[0093] “Plant” includes reference to whole plants, plant organs, plant tissues, seeds and plant cells and progeny of same. Plant cells include, without limitation, cells from seeds, suspension cultures, embryos, meristematic regions, callus tissue, leaves, roots, shoots, gametophytes, sporophytes, pollen, and microspores.

[0094] Provided are plants which are dicots. The terms “dicot” and “dicotyledonous plant” are used interchangeably herein. A dicot of the current disclosure includes the following families: Brassicaceae, Leguminosae, and Solanaceae.

[0095] In an aspect, the methods of the present disclosure may be used for increasing the efficiency of editing of endogenous and previously-introduced heterologous polynucleotides and for improving the frequency and efficiency of homology-directed repair of double-strand-break sites of any plant species, including, but not limited to, monocots and dicots including, but not limited to maize, alfalfa, sorghum, rice, millet, soybean, wheat, cotton, sunflower, barley, oats, rye, flax, sugarcane, banana, cassava, common bean, cowpea, tomato, potato, beet, grape, Eucalyptus, poplar, pine, douglas fir, citrus, papaya, cacao, cucumber, apple, Capsicum, bamboo, Triticale, melon, and Brassica. In an aspect, monocots include, but are not limited to, barley, maize (corn), millet (e.g., pearl millet (Pennisetum glaucum), proso millet (Panicum miliaceum), foxtail millet (Setaria italica), finger millet (Eleusine coracana)), oats, rice, rye, Setaria sp., sorghum, triticale, or wheat, or leaf and stem crops, including, but not limited to, bamboo, marram grass, meadow-grass, reeds, ryegrass, sugarcane; lawn grasses, ornamental grasses, and other grasses such as switchgrass and turf grass. Alternatively, dicot plants used in the present disclosure, include, but are not limited to, kale, cauliflower, broccoli, mustard plant, cabbage, pea, clover, alfalfa, broad bean, tomato, peanut, cassava, soybean, canola, sunflower, safflower, tobacco, Arabidopsis, or cotton.

[0096] In specific aspects, plants in which the methods of the present disclosure are useful for increasing the efficiency of editing of endogenous and previously-introduced heterologous polynucleotides and for improving the frequency and efficiency of homology-directed repair of double-strand-break sites are crop plants (for example, corn, alfalfa, sunflower, Brassica, soybean, cotton, safflower, peanut, rice. sorghum, wheat, millet, tobacco, etc.).

[0097] Progeny plants are provided. “Progeny” comprises any subsequent generation of a plant, and can include F1 progeny, F2 progeny F3 progeny and so on.

[0098] Various changes in phenotype are of interest including, but not limited to, modifying the fatty acid composition in a plant, seed or oil extracted therefrom, altering the fatty acid profile of a plant seed, altering the amounts of fatty acids in a plant seed on seed oil, and the like as disclosed herein. Plants having a desirable phenotype and seed and oil compositions having a fatty acid profile as disclosed herein can be generated by modulating the suppression of FAD2 and FAD3, for example by modulating the suppression of multiple FAD2 and FAD3 alleles, such as one, two, three or all of FAD2-1A, FAD2-1B, FAD-3a and FAD3b alleles. Target sites within the FAD2 and FAD3 alleles can be used to generate short deletions and modifications such as described in Table 1. In an embodiment, the plants and seeds modified as disclosed herein, contain only modified genomic sequence, with no heterologous or foreign DNA remaining in the plant from the modification or in the genomic region of the modification or at the target site. Examples of target sites in soybean include GM-FAD2-1 CR1 (SEQ ID NO: 7) at Gm10:50014185 . . . 50014166 and Gm20:35317773 . . . 35317754 and GM-FAD3 CR2 (SEQ ID NO: 8) at Gm14:45939600 . . . 445939618 and Gm02:41423563 . . . 41423581.

[0099] Provided are seeds, such as soybean seeds, which can be processed to produce oils, and the oils produced therefrom, which contain any combination of oleic acid, linolenic acid, linoleic acid, erucic acid (C:22:1) and saturated fatty acids such as stearic acid and palmitic acid in the amounts disclosed herein. Other saturated fatty acids in the soybean seeds and oils which may be increased or decreased compared with a control plant, seed or oil include myristic acid (C:14:0), and long chain saturated fatty acids arachidic acid (C20:0), behenic acid (C22:0) and lignoceric acid (C24:0).

[0100] Provided are seeds, such as soybean seeds, which can be processed to produce oils, and the oils produced therefrom, which have at least or at least about 50, 51, 52, 53, 54, 55, 56, 57, 58, 59, 60, 61, 62, 63, 64, 65, 66, 67, 68, 69, 70, 71, 72, 73, 74, 75, 76, 77, 78, 79, 80, 81, 82, 83, 84, 85, 86, 87, 88, 89 or 90 percent oleic (C 18:1) acid of the total fatty acids by weight and less than or less than about 100, 99, 98, 97, 96, 95, 94, 93, 92, 91, 90, 89, 88, 87, 86, 85, 84, 83, 82, 81, 80, 79, 78, 76, 75, 74, 73, 72, 71 or 70 percent oleic acid of the total fatty acids by weight.

[0101] Provided are seeds, such as soybean seeds, which can be processed to produce oils, and the oils produced therefrom, which have at least or at least about 0.1, 0.2, 0.3, 0.4, 0.5, 0.6, 0.7, 0.8, 0.9, 1.0, 1.1, 1.2, 1.3, 1.4, 1.5, 1.6, 1.7, 1.8, 1.9, 2.0, 2.1, 2.2, 2.3, 2.4, 2.5, 2.6, 2.7, 2.8, 2.9, or 3.0 percent linolenic (C 18:3) acid of the total fatty acids by weight and less than or less than about 6, 5.5, 5, 4.5, 4, 3.9, 3.8, 3.7, 3.6, 3.5, 3.4, 3.3, 3.2, 3.1, 3.0, 2.9, 2.8, 2.7, 2.6, 2.5, 2.4, 2.3, 2.2, 2.1 or 2.0 percent linolenic acid of the total fatty acids by weight.

[0102] Provided are soybean seeds which can be processed to produce oils, and the oils produced therefrom, which have at least or at least about 0.5, 1, 2, 3, 4, 5, 6, or 7 percent linoleic (C 18:2) acid of the total fatty acids by weight and less than or less than about 55, 50, 45, 40, 35, 30, 25, 20, 15, 10, 9, 8, 7, 6, 5, 4, or 3 percent linoleic acid of the total fatty acids by weight.

[0103] Provided are seeds, such as soybean seeds, which can be processed to produce oils, and the oils produced therefrom, which have at least or at least about 0.1, 0.2, 0.3, 0.4, 0.5, 0.6, 0.7, 0.8, 0.9, 1.0, 1.1, 1.2, 1.3, 1.4, 1.5, 1.6, 1.7, 1.8, 1.9, 2.0, 2.1, 2.2, 2.3, 2.4, 2.5, 2.6, 2.7, 2.8, 2.9, or 3.0 percent stearic acid (C 18:0) of the total fatty acids by weight and less than or less than about 6, 5.5, 5, 4.5, 4, 3.9, 3.8, 3.7, 3.6, 3.5, 3.4, 3.3, 3.2, 3.1, 3.0, 2.9, 2.8, 2.7, 2.6, 2.5, 2.4, 2.3, 2.2, 2.1 or 2.0 percent stearic acid of the total fatty acids by weight. Provided are seeds, such as soybean seeds, which can be processed to produce oils, and the oils produced therefrom, which have at least or at least about 0.1, 0.5, 1.0, 1.5, 2.0, 2.5, 3.0, 3.5, 4.0, 4.5, 5.0, 5.5, 6.0, 6.5 or 7.0 percent palmitic acid (C 16:0) of the total fatty acids by weight and less than or less than about 12, 11.5, 11.0, 10.5, 10.0, 9.5, 9.0, 8.5, 8.0, 7.5, 7.0, 6.5, 6.0, 5.5, 5.0, 4.5, 4.0, 3.5, 3.0, 2.5, 2.0, 1.5, or 1.0 percent palmitic acid of the total fatty acids by weight.

[0104] Provided are seeds, such as soybean seeds, which can be processed to produce oils, and the oils produced therefrom, which have at least or at least about 0.1, 0.5, 1.0, 1.5, 2.0, 2.5, 3.0, 3.5, 4.0, 4.5, 5.0, 5.5, 6.0, 6.5, 7.0, 7.5, 8.0, 8.5, 9.0, 9.5, 10.0, 10.5, or 11.0 percent total saturated fatty acids of the total fatty acids by weight and less than or less than about 16, 15.5, 15, 14.5, 14, 13.5, 13.0, 12.5, 12.0, 11.5, 11.0, 10.5, 10.0, 9.5, 9.0, 8.5, 8.0, 7.5, 7.0, 6.5, 6.0, 5.5, 5.0, 4.5, 4.0, 3.5, 3.0, 2.5 or 2.0 percent total saturated fatty acids of the total fatty acids by weight.

[0105] In an aspect, the seeds, such as soybean seeds, which can be processed to produce oils, and the oils produced therefrom, contain elevated oleic and reduced linolenic acid as described herein, and optionally other modified amounts of other fatty acids as described herein.

[0106] In an aspect, this disclosure concerns host cells comprising either the recombinant DNA constructs of the disclosure as described herein or isolated polynucleotides of the disclosure as described herein. Examples of host cells which can be used to practice the disclosure include, but are not limited to, yeast, bacteria, and plants. In an aspect, Ochrobactrum host cells comprising the recombinant DNA constructs of the disclosure as described herein for improving or enhancing editing of endogenous and previously-introduced heterologous polynucleotides and for improving or enhancing the frequency and efficiency of homology-directed repair of double-strand-break sites are provided.

[0107] A polynucleotide modification template can be introduced into a cell by any method known in the art, such as, but not limited to, transient introduction methods, transfection, transformation, electroporation, microinjection, particle mediated delivery, topical application, whiskers mediated delivery, delivery via cell-penetrating peptides, or mesoporous silica nanoparticle (MSN)-mediated direct delivery. In an aspect, a polynucleotide modification template cassette is introduced into a cell by Ochrobactrum-mediated transformation.

[0108] The polynucleotide modification template can be introduced into a cell as a single stranded polynucleotide molecule, a double stranded polynucleotide molecule, or as part of a circular DNA (vector DNA). The polynucleotide modification template can also be tethered to the guide RNA and/or the Cas endonuclease. Tethered DNAs can allow for co-localizing target and template DNA, useful in genome editing and targeted genome regulation, and can also be useful in targeting post-mitotic cells where function of endogenous HR machinery is expected to be highly diminished (Mali et al. 2013 Nature Methods Vol. 10: 957-963.) The polynucleotide modification template may be present transiently in the cell or it can be introduced via a viral replicon.

[0109] A “modified nucleotide” or “edited nucleotide” refers to a nucleotide sequence of interest that comprises at least one alteration when compared to its non-modified nucleotide sequence. Such “alterations” include, for example: (i) replacement of at least one nucleotide, (ii) a deletion of at least one nucleotide, (iii) an insertion of at least one nucleotide, or (iv) any combination of (i)-(iii).

[0110] The term “polynucleotide modification template” includes a polynucleotide that comprises at least one nucleotide modification when compared to the nucleotide sequence to be edited. A nucleotide modification can be at least one nucleotide substitution, addition or deletion. Optionally, the polynucleotide modification template can further comprise homologous nucleotide sequences flanking the at least one nucleotide modification, wherein the flanking homologous nucleotide sequences provide sufficient homology to the desired nucleotide sequence to be edited.

[0111] The process for editing a genomic sequence combining DSB and modification templates generally comprises: providing to a host cell, a DSB-inducing agent, or a nucleic acid encoding a DSB-inducing agent, that recognizes a target sequence in the chromosomal sequence and is able to induce a DSB in the genomic sequence, and at least one polynucleotide modification template comprising at least one nucleotide alteration when compared to the nucleotide sequence to be edited. The polynucleotide modification template can further comprise nucleotide sequences flanking the at least one nucleotide alteration, in which the flanking sequences are substantially homologous to the chromosomal region flanking the DSB.

[0112] The endonuclease can be provided to a cell by any method known in the art, for example, but not limited to transient introduction methods, transfection, microinjection, and/or topical application or indirectly via recombination constructs. The endonuclease can be provided as a protein or as a guided polynucleotide complex directly to a cell or indirectly via recombination constructs. In an aspect, endonuclease comprises and endonuclease cassette and is introduced into a cell by Ochrobactrum-mediated transformation. The endonuclease can be introduced into a cell transiently or can be incorporated into the genome of the host cell using any method known in the art. In the case of a CRISPR-Cas system, uptake of the endonuclease and/or the guided polynucleotide into the cell can be facilitated with a Cell Penetrating Peptide (CPP) as described in US Patent Publication No. 20170035300, incorporated herein by reference in its entirety.

[0113] As used herein, a “genomic region” is a segment of a chromosome in the genome of a cell that is present on either side of the target site or, alternatively, also comprises a portion of the target site. The genomic region can comprise at least 5-10, 5-15, 5-20, 5-25, 5-30, 5-35, 5-40, 5-45, 5-50, 5-55, 5-60, 5-65, 5-70, 5-75, 5-80, 5-85, 5-90, 5-95, 5-100, 5-200, 5-300, 5-400, 5-500, 5-600, 5-700, 5-800, 5-900, 5-1000, 5-1100, 5-1200, 5-1300, 5-1400, 5-1500, 5-1600, 5-1700, 5-1800, 5-1900, 5-2000, 5-2100, 5-2200, 5-2300, 5-2400, 5-2500, 5-2600, 5-2700, 5-2800. 5-2900, 5-3000, 5-3100 or more bases such that the genomic region has sufficient homology to undergo homologous recombination with the corresponding region of homology.

[0114] TAL effector nucleases (TALEN) are a class of sequence-specific nucleases that can be used to make double-strand breaks at specific target sequences in the genome of a plant or other organism. (Miller et al. (2011) Nature Biotechnology 29:143-148).

[0115] Zinc finger nucleases (ZFNs) are engineered double-strand break inducing agents comprised of a zinc finger DNA binding domain and a double-strand-break-inducing agent domain.

[0116] Genome editing using DSB-inducing agents, such as Cas9-gRNA complexes, has been described, for example in U.S. Patent Publication Nos. 20150082478 A1, 20150059010 A1, 20170306349 A1 and 20170226533 A1, all of which are incorporated herein by reference in their entireties.

[0117] The term “Cas gene” herein refers to a gene that is generally coupled, associated or close to, or in the vicinity of flanking CRISPR loci in bacterial systems. The terms “Cas gene”, “CRISPR-associated (Cas) gene” are used interchangeably herein. The term “Cas endonuclease” herein refers to a protein encoded by a Cas gene. A Cas endonuclease herein, when in complex with a suitable polynucleotide component, is capable of recognizing, binding to, and optionally nicking or cleaving all or part of a specific DNA target sequence. A Cas endonuclease described herein comprises one or more nuclease domains. Cas endonucleases of the disclosure includes those having a HNH or HNH-like nuclease domain and/or a RuvC or RuvC-like nuclease domain. A Cas endonuclease of the disclosure includes a Cas9 protein, a Cpf1 protein, a C2c1 protein, a C2c2 protein, a C2c3 protein, Cas3, Cas 5, Cas7, Cas8, Cas10, or complexes of these.

[0118] As used herein, the terms “guide polynucleotide/Cas endonuclease complex”, “guide polynucleotide/Cas endonuclease system”, “guide polynucleotide/Cas complex”, “guide polynucleotide/Cas system”, “guided Cas system” are used interchangeably herein and refer to at least one guide polynucleotide and at least one Cas endonuclease that are capable of forming a complex, wherein said guide polynucleotide/Cas endonuclease complex can direct the Cas endonuclease to a DNA target site, enabling the Cas endonuclease to recognize, bind to, and optionally nick or cleave (introduce a single or double strand break) the DNA target site. A guide polynucleotide/Cas endonuclease complex herein can comprise Cas protein(s) and suitable polynucleotide component(s) of any of the four known CRISPR systems (Horvath and Barrangou, 2010, Science 327:167-170) such as a type I, II, or III CRISPR system. A Cas endonuclease unwinds the DNA duplex at the target sequence and optionally cleaves at least one DNA strand, as mediated by recognition of the target sequence by a polynucleotide (such as, but not limited to, a crRNA or guide RNA) that is in complex with the Cas protein. Such recognition and cutting of a target sequence by a Cas endonuclease typically occurs if the correct protospacer-adjacent motif (PAM) is located at or adjacent to the 3′ end of the DNA target sequence. Alternatively, a Cas protein herein may lack DNA cleavage or nicking activity but can still specifically bind to a DNA target sequence when complexed with a suitable RNA component. (See also U.S. Patent Application US 2015-0082478 A1, published on Mar. 19, 2015 and US 2015-0059010 A1, published on Feb. 26, 2015, both are hereby incorporated in its entirety by reference).

[0119] A guide polynucleotide/Cas endonuclease complex can cleave one or both strands of a DNA target sequence. A guide polynucleotide/Cas endonuclease complex that can cleave both strands of a DNA target sequence typically comprise a Cas protein that has all of its endonuclease domains in a functional state (e.g., wild type endonuclease domains or variants thereof retaining some or all activity in each endonuclease domain). Non-limiting examples of Cas9 nickases suitable for use herein are disclosed in U.S. Patent Publication No. 20140189896 A1, which is incorporated herein by reference.

[0120] Other Cas endonuclease systems have been described in US Patent Publication No. 20180258417 A1, incorporated herein by reference in its entirety.

[0121] “Cas9” (formerly referred to as Cas5, Csn1, or Csx12) herein refers to a Cas endonuclease of a type II CRISPR system that forms a complex with a crNucleotide and a tracrNucleotide, or with a single guide polynucleotide, for specifically recognizing and cleaving all or part of a DNA target sequence. Cas9 protein comprises a RuvC nuclease domain and an HNH (H—N—H) nuclease domain, each of which can cleave a single DNA strand at a target sequence (the concerted action of both domains leads to DNA double-strand cleavage, whereas activity of one domain leads to a nick). In general, the RuvC domain comprises subdomains I, II and III, where domain I is located near the N-terminus of Cas9 and subdomains II and III are located in the middle of the protein, flanking the HNH domain (Hsu et al, Cell 157:1262-1278). A type II CRISPR system includes a DNA cleavage system utilizing a Cas9 endonuclease in complex with at least one polynucleotide component. For example, a Cas9 can be in complex with a CRISPR RNA (crRNA) and a trans-activating CRISPR RNA (tracrRNA). In another example, a Cas9 can be in complex with a single guide RNA.

[0122] Any guided endonuclease can be used in the methods disclosed herein. Such endonucleases include, but are not limited to, Cas9 and Cpf1 endonucleases. Many endonucleases have been described to date that can recognize specific PAM sequences (see for example—Jinek et al. (2012) Science 337 p 816-821, PCT patent applications PCT/US16/32073, filed May 12, 2016 and PCT/US16/32028 filed May 12, 2016 and Zetsche B et al. 2015. Cell 163, 1013) and cleave the target DNA at a specific position. It is understood that based on the methods and embodiments described herein utilizing a guided Cas system one can now tailor these methods such that they can utilize any guided endonuclease system.

[0123] The guide polynucleotide can also be a single molecule (also referred to as single guide polynucleotide) comprising a crNucleotide sequence linked to a tracrNucleotide sequence. The single guide polynucleotide comprises a first nucleotide sequence domain (referred to as Variable Targeting domain or VT domain) that can hybridize to a nucleotide sequence in a target DNA and a Cas endonuclease recognition domain (CER domain), that interacts with a Cas endonuclease polypeptide.

[0124] In an aspect, the guide polynucleotide can be introduced into a cell transiently, as single stranded polynucleotide or a double stranded polynucleotide, using any method known in the art such as, but not limited to, particle bombardment, Agrobacterium-mediated transformation, Ochrobactrum-mediated transformation, Rhizobiaceae-mediated transformation, or topical applications. In an aspect, the guide polynucleotide can also be introduced indirectly into a cell by introducing a recombinant DNA molecule (via methods such as, but not limited to, particle bombardment, Agrobacterium-mediated transformation, Ochrobactrum-mediated transformation, Rhizobiaceae-mediated transformation, or topical applications) comprising a heterologous nucleic acid fragment encoding a guide polynucleotide, operably linked to a specific promoter that is capable of transcribing the guide RNA in said cell. The specific promoter can be, but is not limited to, a RNA polymerase III promoter, which allow for transcription of RNA with precisely defined, unmodified, 5′- and 3′-ends (DiCarlo et al., Nucleic Acids Res. 41: 4336-4343; Ma et al., Mol. Ther. Nucleic Acids 3:e161) as described in WO2016025131, published on Feb. 18, 2016, incorporated herein in its entirety by reference.

[0125] The terms “target site”, “target sequence”, “target site sequence, “target DNA”, “target locus”, “genomic target site”, “genomic target sequence”, “genomic target locus” and “protospacer”, are used interchangeably herein and refer to a polynucleotide sequence such as, but not limited to, a nucleotide sequence on a chromosome, episome, or any other DNA molecule in the genome (including chromosomal, chloroplastic, mitochondrial DNA, plasmid DNA) of a cell, at which a guide polynucleotide/Cas endonuclease complex can recognize, bind to, and optionally nick or cleave. The target site can be an endogenous site in the genome of a cell, or alternatively, the target site can be heterologous to the cell and thereby not be naturally occurring in the genome of the cell, or the target site can be found in a heterologous genomic location compared to where it occurs in nature. As used herein, terms “endogenous target sequence” and “native target sequence” are used interchangeable herein to refer to a target sequence that is endogenous or native to the genome of a cell and is at the endogenous or native position of that target sequence in the genome of the cell. Cells include, but are not limited to, human, non-human, animal, bacterial, fungal, insect, yeast, non-conventional yeast, and plant cells as well as plants and seeds produced by the methods described herein. An “artificial target site” or “artificial target sequence” are used interchangeably herein and refer to a target sequence that has been introduced into the genome of a cell. Such an artificial target sequence can be identical in sequence to an endogenous or native target sequence in the genome of a cell but be located in a different position (i.e., a non-endogenous or non-native position) in the genome of a cell.

[0126] Provided are plants and seeds which contain an altered or modified target site or sequence. An “altered target site”, “altered target sequence”, “modified target site”, “modified target sequence” are used interchangeably herein and refer to a target sequence as disclosed herein that comprises at least one alteration when compared to non-altered target sequence. Such “alterations” include, for example: (i) replacement of at least one nucleotide, (ii) a deletion of at least one nucleotide, (iii) an insertion of at least one nucleotide, or (iv) any combination of (i)-(iii).

[0127] Methods for “modifying a target site” and “altering a target site” are used interchangeably herein and refer to methods for producing an altered target site.

[0128] The length of the target DNA sequence (target site) can vary, and includes, for example, target sites that are at least 12, 13, 14, 15, 16, 17, 18, 19, 20, 21, 22, 23, 24, 25, 26, 27, 28, 29, 30 or more nucleotides in length. It is further possible that the target site can be palindromic, that is, the sequence on one strand reads the same in the opposite direction on the complementary strand. The nick/cleavage site can be within the target sequence or the nick/cleavage site could be outside of the target sequence. In another variation, the cleavage could occur at nucleotide positions immediately opposite each other to produce a blunt end cut or, in other Cases, the incisions could be staggered to produce single-stranded overhangs, also called “sticky ends”, which can be either 5′ overhangs, or 3′ overhangs. Active variants of genomic target sites can also be used. Such active variants can comprise at least 65%, 70%, 75%, 80%, 85%, 90%, 91%, 92%, 93%, 94%, 95%, 96%, 97%, 98%, 99% or more sequence identity to the given target site, wherein the active variants retain biological activity and hence are capable of being recognized and cleaved by a Cas endonuclease. Assays to measure the single or double-strand break of a target site by an endonuclease are known in the art and generally measure the overall activity and specificity of the agent on DNA substrates containing recognition sites.

[0129] The terms “targeting”, “gene targeting” and “DNA targeting” are used interchangeably herein. DNA targeting herein may be the specific introduction of a knock-out, edit, or knock-in at a particular DNA sequence, such as in a chromosome or plasmid of a cell. In general, DNA targeting can be performed herein by cleaving one or both strands at a specific DNA sequence in a cell with an endonuclease associated with a suitable polynucleotide component. Such DNA cleavage, if a double-strand break (DSB), can prompt NHEJ or HDR processes which can lead to modifications at the target site.

[0130] A targeting method herein can be performed in such a way that two or more DNA target sites are targeted in the method, for example. Such a method can optionally be characterized as a multiplex method. Two, three, four, five, six, seven, eight, nine, ten, or more target sites can be targeted at the same time in certain embodiments. A multiplex method is typically performed by a targeting method herein in which multiple different RNA components are provided, each designed to guide a guide polynucleotide/Cas endonuclease complex to a unique DNA target site.

[0131] In an aspect, provided are plants and seeds in which a functional sequence has been knocked out. The terms “knock-out”, “gene knock-out” and “genetic knock-out” are used interchangeably herein. A knock-out represents a DNA sequence of a cell that has been rendered partially or completely inoperative by targeting with a Cas protein; such a DNA sequence prior to knock-out could have encoded an amino acid sequence, or could have had a regulatory function (e.g., promoter), for example. A knock-out may be produced by an indel (insertion or deletion of nucleotide bases in a target DNA sequence through NHEJ), or by specific removal of sequence that reduces or completely destroys the function of sequence at or near the targeting site.

[0132] The guide polynucleotide/Cas endonuclease system can be used in combination with a co-delivered polynucleotide modification template to allow for editing (modification) of a genomic nucleotide sequence of interest. (See, U.S. Patent Publication Nos. 20150082478 A1 and 20150059010 A1, both of which are hereby incorporated herein by reference in their entireties.)

[0133] Provided are plants and seeds in which a functional sequence has been knocked in. The terms “knock-in”, “gene knock-in, “gene insertion” and “genetic knock-in” are used interchangeably herein. A knock-in represents the replacement or insertion of a DNA sequence at a specific DNA sequence in cell by targeting with a Cas protein (by HR, wherein a suitable donor DNA polynucleotide is also used). Examples of knock-ins are a specific insertion of a heterologous amino acid coding sequence in a coding region of a gene, or a specific insertion of a transcriptional regulatory element in a genetic locus.

[0134] The structural similarity between a given genomic region and the corresponding region of homology found on the donor DNA can be any degree of sequence identity that allows for homologous recombination to occur. For example, the amount of homology or sequence identity shared by the “region of homology” of the donor DNA and the “genomic region” of the organism genome can be at least 50%, 55%, 60%, 65%, 70%, 75%, 80%, 81%, 82%, 83%, 84%, 85%, 86%, 87%, 88%, 89%, 90%, 91%, 92%, 93%, 94%, 95%, 96%, 97%, 98%, 99% or 100% sequence identity, such that the sequences undergo homologous recombination

[0135] The region of homology on the donor DNA can have homology to any sequence flanking the target site. While in some embodiments the regions of homology share significant sequence homology to the genomic sequence immediately flanking the target site, it is recognized that the regions of homology can be designed to have sufficient homology to regions that may be further 5′ or 3′ to the target site. In still other embodiments, the regions of homology can also have homology with a fragment of the target site along with downstream genomic regions. In one embodiment, the first region of homology further comprises a first fragment of the target site and the second region of homology comprises a second fragment of the target site, wherein the first and second fragments are dissimilar.

[0136] As used herein, “homologous recombination” includes the exchange of DNA fragments between two DNA molecules at the sites of homology.

[0137] Further uses for guide RNA/Cas endonuclease systems have been described (See U.S. Patent Publication Nos. 20150082478 A1, 20150059010 A1, 20170306349 A1, and 20170226533 A1, all of which are incorporated herein by reference in their entireties) and include, but are not limited to, modifying or replacing nucleotide sequences of interest (such as a regulatory elements), insertion of polynucleotides of interest, gene knock-out, gene-knock in, modification of splicing sites and/or introducing alternate splicing sites, modifications of nucleotide sequences encoding a protein of interest, amino acid and/or protein fusions, and gene silencing by expressing an inverted repeat into a gene of interest.

[0138] Methods for transforming dicots, by use of Ochrobactrum-mediated transformation disclosed in US Patent Publication No. 20180216123 incorporated herein by reference in its entirety, Rhizobiaceae-mediated transformation (See U.S. Pat. No. 9,365,859 incorporated herein by reference in its entirety), and Agrobacterium-mediated transformation, and obtaining transgenic plants have been published.

[0139] There are a variety of methods for the regeneration of plants from plant tissues. The particular method of regeneration will depend on the starting plant tissue and the particular plant species to be regenerated.

[0140] In an aspect, this disclosure also concerns methods of increasing the efficiency of editing a target site of a trait of interest or a nucleotide sequence in the genome of a plant which comprise:

[0141] (a) providing to a plant cell an editing T-DNA, wherein the editing T-DNA comprises in operable linkage from a right border to a left border orientation, a guide RNA expression cassette wherein, the guide RNA expression cassette comprises a regulatory element operably linked to a polynucleotide encoding a guide RNA, wherein the guide RNA is complementary to the target site of the trait or nucleotide of interest, a trait or nucleotide of interest modification template cassette, wherein the trait or nucleotide of interest modification template cassette comprises at least one nucleotide modification of the trait or nucleotide of interest, and a Cas endonuclease expression cassette, wherein the Cas endonuclease expression cassette comprises a regulatory element operably linked to a Cas endonuclease, wherein the guide RNA and the Cas endonuclease are capable of forming a complex that enables the Cas endonuclease to introduce a double strand break at the target site of the trait or nucleotide of interest and the trait or nucleotide of interest modification template cassette is capable of making at least one nucleotide modification at the target site of the trait or nucleotide of interest;

[0142] (b) identifying at least one plant cell of (a) that has a modification at the target site of the trait or nucleotide of interest, wherein the modification includes at least one deletion or substitution of one or more nucleotides at the target site of the trait or nucleotide of interest; and

[0143] (c) regenerating a plant from the at least one plant cell of (b) having the modification at the target site of the trait or nucleotide of interest having increased editing efficiency when compared to a control plant having a modification at the target site of the trait or nucleotide of interest provided by a control plant editing T-DNA, wherein the control plant editing T-DNA comprises in operable linkage from a right border to a left border orientation, a Cas endonuclease expression cassette, wherein the Cas endonuclease expression cassette comprises a regulatory element operably linked to a Cas endonuclease and a guide RNA expression cassette wherein, the guide RNA expression cassette comprises a regulatory element operably linked to a polynucleotide encoding a guide RNA, wherein the guide RNA is complementary to the target site and wherein the guide RNA and the Cas endonuclease are capable of forming a complex that enables the Cas endonuclease to introduce cleavage at the target site.

[0144] In an aspect, this disclosure also concerns methods of increasing the efficiency of altering the fatty acid profile in the seed of a plant which comprises:

[0145] (a) providing to a plant cell an editing T-DNA, wherein the editing T-DNA comprises in operable linkage from a right border to a left border orientation, a guide RNA expression cassette wherein, the guide RNA expression cassette comprises a regulatory element operably linked to a polynucleotide encoding a guide RNA, wherein the guide RNA is complementary a FAD2 genomic sequence in the plant genome, a FAD3 genomic sequence in the plant genome, or a combination thereof, a polynucleotide modification template cassette, wherein the polynucleotide modification template cassette comprises at least one nucleotide modification of a FAD2 genomic sequence in the plant genome, a FAD3 genomic sequence in the plant genome, or a combination thereof, and a Cas endonuclease expression cassette, wherein the Cas endonuclease expression cassette comprises a regulatory element operably linked to a Cas endonuclease, wherein the guide RNA and the Cas endonuclease are capable of forming a complex that enables the Cas endonuclease to introduce a double strand break in the FAD2 genomic sequence in the plant genome, the FAD3 genomic sequence in the plant genome, or a combination thereof and the polynucleotide modification template cassette enables at least one nucleotide modification of the FAD2 genomic sequence in the plant genome, the FAD3 genomic sequence in the plant genome, or the combination thereof;

[0146] (b) obtaining a plant from the plant cell of (a);

[0147] (c) evaluating the plant of (b) for the presence of the at least one nucleotide modification;

[0148] (d) selecting a progeny plant of (c) having an altered fatty acid profile; and

[0149] (e) obtaining seed from the progeny plant of (d) having increased editing efficiency when compared to a control seed of a plant having a modification of the FAD2 genomic sequence, the FAD3 genomic sequence, or the combination thereof provided by a control seed editing T-DNA, wherein the control seed editing T-DNA comprises in operable linkage from a right border to a left border orientation, a Cas endonuclease expression cassette, wherein the Cas endonuclease expression cassette comprises a regulatory element operably linked to a Cas endonuclease and a guide RNA expression cassette wherein, the guide RNA expression cassette comprises a regulatory element operably linked to a polynucleotide encoding a guide RNA, wherein the guide RNA is complementary to the target site and wherein the guide RNA and the Cas endonuclease are capable of forming a complex that enables the Cas endonuclease to introduce cleavage at the target site. Further screening of a progeny plant of (c) having an altered fatty acid profile may be performed to obtain a progeny plant that is also void of the guide RNA and the Cas endonuclease.

[0150] In an aspect, this disclosure also concerns methods for increasing the efficiency of editing a target site in a plant, the method comprising:

[0151] (a) providing to a plant cell an editing T-DNA, wherein the editing T-DNA comprises in operable linkage from a right border to a left border orientation, a guide RNA expression cassette wherein, the guide RNA expression cassette comprises a regulatory element operably linked to a polynucleotide encoding a guide RNA, wherein the guide RNA is complementary to the target site and a Cas endonuclease expression cassette, wherein the Cas endonuclease expression cassette comprises a regulatory element operably linked to a Cas endonuclease, wherein the guide RNA and the Cas endonuclease are capable of forming a complex that enables the Cas endonuclease to introduce cleavage at the target site;

[0152] (b) identifying at least one plant cell of (a) that has a modification at the target site, wherein the modification includes at least one deletion or substitution of one or more nucleotides at the target site; and

[0153] (c) regenerating a plant from the at least one plant cell of (b) having the modification at the target site having increased editing efficiency when compared to a control plant having a modification at the target site provided by a control plant editing T-DNA, wherein the control plant editing T-DNA comprises in operable linkage from a right border to a left border orientation, a Cas endonuclease expression cassette, wherein the Cas endonuclease expression cassette comprises a regulatory element operably linked to a Cas endonuclease and a guide RNA expression cassette wherein, the guide RNA expression cassette comprises a regulatory element operably linked to a polynucleotide encoding a guide RNA, wherein the guide RNA is complementary to the target site and wherein the guide RNA and the Cas endonuclease are capable of forming a complex that enables the Cas endonuclease to introduce cleavage at the target site.

[0154] In an aspect, this disclosure also concerns methods of increasing the efficiency of altering the fatty acid profile in the seed of a plant, the method comprising:

[0155] (a) providing to a plant cell an editing T-DNA, wherein the editing T-DNA comprises in operable linkage from a right border to a left border orientation, a guide RNA expression cassette wherein, the guide RNA expression cassette comprises a regulatory element operably linked to a polynucleotide encoding a guide RNA, wherein the guide RNA is complementary a FAD2 genomic sequence in the plant genome, a FAD3 genomic sequence in the plant genome, or a combination thereof, and a Cas endonuclease expression cassette, wherein the Cas endonuclease expression cassette comprises a regulatory element operably linked to a Cas endonuclease, wherein the guide RNA and the Cas endonuclease are capable of forming a complex that enables the Cas endonuclease to introduce cleavage in the FAD2 genomic sequence in the plant genome, the FAD3 genomic sequence in the plant genome, or a combination thereof;

[0156] (b) obtaining a plant from the plant cell of (a);

[0157] (c) evaluating the plant of (b) for the presence of the at least one nucleotide modification;

[0158] (d) selecting a progeny plant of (c) having an altered fatty acid profile; and

[0159] (e) obtaining seed from the progeny plant of (d) having increased editing efficiency when compared to a control seed of a plant having a modification of the FAD2 genomic sequence, the FAD3 genomic sequence, or the combination thereof provided by a control seed editing T-DNA, wherein the control seed editing T-DNA comprises in operable linkage from a right border to a left border orientation, a Cas endonuclease expression cassette, wherein the Cas endonuclease expression cassette comprises a regulatory element operably linked to a Cas endonuclease and a guide RNA expression cassette wherein, the guide RNA expression cassette comprises a regulatory element operably linked to a polynucleotide encoding a guide RNA, wherein the guide RNA is complementary a FAD2 genomic sequence in the plant genome, a FAD3 genomic sequence in the plant genome, or a combination thereof wherein the guide RNA and the Cas endonuclease are capable of forming a complex that enables the Cas endonuclease to introduce cleavage in the FAD2 genomic sequence in the plant genome, the FAD3 genomic sequence in the plant genome, or a combination thereof.

[0160] In an aspect, this disclosure also concerns methods of increasing the efficiency of altering the fatty acid profile in the seed of a plant, the method comprising:

[0161] (a) providing to a plant cell an editing T-DNA, wherein the editing T-DNA comprises in operable linkage from a right border to a left border orientation, a guide RNA expression cassette wherein, the guide RNA expression cassette comprises a regulatory element operably linked to a polynucleotide encoding a guide RNA, wherein the guide RNA is complementary a FAD2 genomic sequence in the plant genome, a FAD3 genomic sequence in the plant genome, or a combination thereof, and a Cas endonuclease expression cassette, wherein the Cas endonuclease expression cassette comprises a regulatory element operably linked to a Cas endonuclease, wherein the guide RNA and the Cas endonuclease are capable of forming a complex that enables the Cas endonuclease to introduce cleavage within the FAD2 genomic sequence in the plant genome, the FAD3 genomic sequence in the plant genome, or a combination thereof;

[0162] (b) obtaining a plant from the plant cell of (a);

[0163] (c) evaluating the plant of (b) for the presence of the at least one nucleotide modification;

[0164] (d) screening a progeny plant of (c) having an altered fatty acid profile that is void of the guide RNA and the Cas endonuclease; and

[0165] (e) obtaining seed from the progeny plant of (d) having increased editing efficiency when compared to a control seed of a plant having a modification of the FAD2 genomic sequence, the FAD3 genomic sequence, or the combination thereof provided by a control seed editing T-DNA, wherein the control seed editing T-DNA comprises in operable linkage from a right border to a left border orientation, a Cas endonuclease expression cassette, wherein the Cas endonuclease expression cassette comprises a regulatory element operably linked to a Cas endonuclease and a guide RNA expression cassette wherein, the guide RNA expression cassette comprises a regulatory element operably linked to a polynucleotide encoding a guide RNA, wherein the guide RNA is complementary a FAD2 genomic sequence in the plant genome, a FAD3 genomic sequence in the plant genome, or a combination thereof, and wherein the guide RNA and the Cas endonuclease are capable of forming a complex that enables the Cas endonuclease to introduce cleavage within the FAD2 genomic sequence in the plant genome, the FAD3 genomic sequence in the plant genome, or a combination thereof.

[0166] In an aspect, this disclosure also concerns methods for increasing the efficiency of introducing a nucleotide of interest into a target site in the genome of a plant, the method comprising:

[0167] (a) providing to a plant cell an editing T-DNA, wherein the editing T-DNA comprises in operable linkage from a right border to a left border orientation, a guide RNA expression cassette wherein, the guide RNA expression cassette comprises a regulatory element operably linked to a polynucleotide encoding a guide RNA and a Cas endonuclease expression cassette, wherein the Cas endonuclease expression cassette comprises a regulatory element operably linked to a Cas endonuclease, wherein the guide RNA and the Cas endonuclease are capable of forming a complex that enables the Cas endonuclease to cleavage at the target site;

[0168] (b) contacting the plant cell of (a) with a donor DNA comprising the polynucleotide of interest;

[0169] (c) identifying at least one plant cell from (b) comprising in its genome the polynucleotide of interest integrated at the target site; and

[0170] (d) regenerating a plant from the at least one plant cell having in its genome the polynucleotide of interest integrated at the target site having increased efficiency of introduction of the polynucleotide of interest into the target site in the genome of the plant cell when compared to a control plant having an introduction of the polynucleotide of interest into the target site in the genome of the plant cell provided by a control plant editing T-DNA, wherein the control plant editing T-DNA comprises in operable linkage from a right border to a left border orientation, a Cas endonuclease expression cassette, wherein the Cas endonuclease expression cassette comprises a regulatory element operably linked to a Cas endonuclease and a guide RNA expression cassette wherein, the guide RNA expression cassette comprises a regulatory element operably linked to a polynucleotide encoding a guide RNA, wherein the guide RNA and the Cas endonuclease are capable of forming a complex that enables the Cas endonuclease to cleavage at the target site.

[0171] In an aspect, the editing T-DNA comprises in operable linkage from a right border to a left border orientation a guide RNA expression cassette. In an aspect, the guide RNA expression cassette of the editing T-DNA is adjacent to the right border and may be separated from the right border by one or more spacer elements and optionally may be separated from the right border by one or more elements that facilitate PCR analysis. Non-limiting examples of editing T-DNAs useful in the present disclosure are shown in FIG. 8-FIG. 16. See also, FIG. 1A and FIG. 1C.

[0172] In an aspect, the control plant editing T-DNA comprises in operable linkage from a left border to a right border orientation a guide RNA expression cassette. In an aspect, the guide RNA expression cassette of the editing T-DNA is adjacent to the left border and may be separated from the left border by one or more spacer elements and optionally may be separated from the right border by one or more elements that facilitate PCR analysis. See FIG. 1B and FIG. 1D.

[0173] Transformation and selection can be accomplished using methods well-known to those skilled in the art including, but not limited to, the methods described herein.

[0174] The soybean seeds can be processed to produce oil and protein. Methods of processing the soybean seeds to produce oil and protein are provided which include one or more steps of dehulling the seeds, crushing the seeds, heating the seeds, such as with steam, extracting the oil, roasting, and extrusion. Processing and oil extraction can be done using solvents or mechanical extraction.

[0175] Products formed following processing include, without limitation, soy nuts, soy milk, tofu, texturized soy protein, soybean oil, soy protein flakes, isolated soy protein. Crude or partially degummed oil can be further processed by one or more of degumming, alkali treatment, silica absorption, vacuum bleaching, hydrogenation, interesterification, filtration, deodorization, physical refining, refractionation, and optional blending to produce refined bleached deodorized (RBD) oil.

[0176] The oil and protein can be used in animal feed and in food products for human consumption. Provided are food products and animal feed comprising oils, protein and compositions described herein. The food products and animal feed may comprise nucleotides comprising one or more of the modified alleles disclosed herein.

[0177] Methods of detecting the modified polynucleotides are provided. Methods of extracting modified DNA from a sample or detecting the presence of DNA corresponding to the modified genomic sequences comprising deletions of FAD2-1 and FAD3, such as presented in FIG. 3A-FIG. 3B, FIG. 4A-FIG. 4B, and FIG. 5A-FIG. 5B can be carried out. Such methods comprise contacting a sample comprising soybean genomic DNA with a DNA primer set, that when used in a nucleic acid amplification reaction, such as the polymerase chain reaction (PCR), with genomic DNA extracted from soybeans produces an amplicon that is diagnostic for either the presence or absence of the modified FAD2-1A and FAD3 alleles. The methods include the steps of performing a nucleic acid amplification reaction, thereby producing the amplicon and detecting the amplicon.

[0178] In some embodiments, one of the pair of DNA molecules comprises the wild type sequence where the modification occurs with the second of the pair being upstream or downstream as appropriate and suitably in proximity to the wild type sequence where the modification occurs, such that an amplicon is produced when the wild type allele is present, but no amplicon is produced when the modified allele is present. Suitable primers and probes for use in reactions to detect the presence of the alleles of FAD2-1A (e.g. SEQ ID NOs: 11, 12 and 13 and functional fragments thereof), FAD2-1B (e.g. SEQ ID NOs: 14, 12 and 15 and functional fragments thereof), FAD3a (e.g. SEQ ID NOs: 16, 17 and 18 and functional fragments thereof) and FAD3b (e.g. SEQ ID NOs: 19, 17 and 18 and functional fragments thereof) are provided in Table 3 and described in Example 4. In the context of the methods, in proximity means sufficiently close such that the distance between the first and second of the pair of DNA molecules facilitates the production of an amplicon when included in a DNA amplification reaction comprising soybean genomic DNA. For example, the second primer may bind at a location beginning at, within or less than 1, 2, 5, 10, 20, 30, 40, 50, 60, 70, 80, 90, 100, 150, 200, 250, 300, 350, 400, 450, 500, 600, 700, 800, 900, 1000, 1500, 16, 1700, 1800, 1900, 2000, 2100, 2200, 2300, 2400, 2500, 2600, 2700, 2800, 2900, 3000, 3500, 4000, 4500 or 5000 nucleotides upstream or downstream of the end of the binding site of the first DNA primer molecule.

[0179] Probes and primers are provided which are of sufficient nucleotide length to bind specifically to the target DNA sequence under the reaction or hybridization conditions. Suitable probes and primers are at least 10, 11, 12, 13, 14, 15, 16, 17, 18, 19, 20, 21, 22, 23, 24, 25, 26, 27, 28, 29 or 30 nucleotides in length, and less than 35, 34, 33, 32, 31, 30, 29, 28, 27, 26, 2, 5 2, 4 23, 22, 21, 20, 19, 18, 17, 16, 15, 14, 13, or 12 nucleotides in length. Such probes and primers can hybridize specifically to a target sequence under high stringency hybridization conditions. Preferably, probes and primers have complete or 100% DNA sequence similarity of contiguous nucleotides with the target sequence, although probes which differ from the target DNA sequence but retain the ability to hybridize to target DNA sequence may be also be used. Reverse complements of the primers and probes disclosed herein are also provided and can be used in the methods and compositions described herein.

[0180] In some embodiments, one of the pair of DNA molecules comprises the modification or traverses the modification junction such as the deletion junctions depicted in FIGS. 1-3, with the second DNA molecule of the pair being upstream or downstream of the genomic sequence as appropriate, such that an amplicon is produced when the modified allele is present, but no amplicon is produced when the wild type allele is present. Suitable primers for use in reactions to detect the presence of the modified alleles can be designed based on the junction sequences depicted in FIG. 3A—FIG. 3B, FIG. 4A—FIG. 4B, and FIG. 5A—FIG. 5B for the modified alleles.

[0181] For example, for SEQ ID NO: 55, the deletion junction occurs between positions 27 and 28; a primer can be designed which begins (or includes if beginning before position 1) at position 1 through position 27 and ends (or includes if ending after position 55) at position 29 to 55, provided that the primer is of sufficient length to function in the amplification reaction. The reverse complement of such a primer is also provided.

[0182] For example, for SEQ ID NO: 56, the deletion junction occurs between positions 23 and 24; a primer can be designed which begins (or includes if beginning before position 1) at position 1 through position 23 and ends (or includes if ending after position 55) at position 24 to 55, provided that the primer is of sufficient length to function in the amplification reaction. The reverse complement of such a primer is also provided.

[0183] For example, for SEQ ID NO: 47, the deletion junction occurs between positions 27 and 28; a primer can be designed which begins (or includes if beginning before position 1) at position 1 through position 27 and ends (or includes if ending after position 57) at position 28 to 57, provided that the primer is of sufficient length to function in the amplification reaction. The reverse complement of such a primer is also provided.

[0184] For example, for SEQ ID NO: 61, the deletion junction occurs between positions 27 and 28; a primer can be designed which begins (or includes if beginning before position 1) at position 1 through position 27 and ends (or includes if ending after position 55) at position 29 to 55, provided that the primer is of sufficient length to function in the amplification reaction. The reverse complement of such a primer is also provided.

[0185] For example, for SEQ ID NO: 70, the deletion junction occurs between positions 20 and 21; a primer can be designed which begins (or includes if beginning before position 1) at position 1 through position 20 and ends (or includes if ending after position 60) at position 22 to 60, provided that the primer is of sufficient length to function in the amplification reaction. The reverse complement of such a primer is also provided.

[0186] For example, for SEQ ID NO: 74, the deletion junction occurs between positions 20 and 21; a primer can be designed which begins (or includes if beginning before position 1) at position 1 through position 20 and ends (or includes if ending after position 58) at position 21 to 58, provided that the primer is of sufficient length to function in the amplification reaction. The reverse complement of such a primer is also provided.

[0187] For example, for SEQ ID NO: 77, the deletion junction occurs between positions 20 and 21; a primer can be designed which begins (or includes if beginning before position 1) at position 1 through position 20 and ends (or includes if ending after position 60) at position 22 to 60, provided that the primer is of sufficient length to function in the amplification reaction. The reverse complement of such a primer is also provided.

[0188] According to another aspect of the invention, methods of detecting the presence of a DNA molecule corresponding to the modified FAD2-1 and FAD3 alleles in a sample, include contacting the sample comprising DNA extracted from a soybean plant, cell or seed with a DNA probe molecule that hybridizes under stringent hybridization conditions with genomic DNA from a soybean comprising the modified FAD2-1 or FAD3 alleles and does not hybridize under stringent hybridization conditions with a control soybean plant DNA, The sample and probe are subjected to stringent hybridization conditions and hybridization of the probe to the DNA from the soybean plant, cell or seed comprising the modified FAD2-1 or FAD3

[0189] In some embodiments, the primers and probes bind and traverse the modification, such as a deletion junction, in the genomic DNA and have a sequence following the modification or junction in the 5′ to 3′ direction which is less than 10, 9, 8, 7, 6, 5, 4, 3, or 2 nucleotides in length and at least 1, 2, 3, 4 or 5 nucleotides in length.

### EXAMPLES

[0190] The present disclosure is further defined in the following Examples, in which parts and percentages are by weight and degrees are Celsius, unless otherwise stated. It should be understood that these Examples, while indicating embodiments of the invention, are given by way of illustration only. From the above discussion and these Examples, one skilled in the art can ascertain the essential characteristics of this disclosure, and without departing from the spirit and scope thereof, can make various changes and modifications of the disclosure to adapt it to various usages and conditions. Such modifications are also intended to fall within the scope of the appended claims.

### Example 1

### Soybean Optimized Expression Cassettes for Guide RNA/Cas Endonuclease Based Genome Modification in Soybean Plants

[0191] To use the guide RNA/Cas endonuclease system in soybean, the Cas9 gene from Streptococcus pyogenes M1 GAS (SF370) was soybean codon optimized per standard techniques known in the art. To facilitate nuclear localization of the Cas9 protein in soybean cells, Arabidopsis gene At3g04980 (amino acid 3118-3124) monopartite amino terminal nuclear localization signal AT-NLS (PKKKRKV, SEQ ID NO: 2) and Agrobacterium tumefaciens bipartite VirD2 T-DNA border endonuclease carboxyl terminal nuclear localization signal (KRPRDRHDGELGGRKRAR, SEQ ID NO: 3) were incorporated at the amino and carboxyl-termini of the Cas9 open reading frame, respectively. The soybean optimized Cas9 gene was operably linked to a soybean constitutive promoter such as the soybean constitutive promoter GM-EF1A2 disclosed in US Patent Publication No. 20090133159, incorporated herein by reference in its entirety (SEQ ID NO: 4) by standard molecular biological techniques.

[0192] The second component necessary to form a functional guide RNA/Cas endonuclease system for genome engineering applications is a duplex of the crRNA and tracrRNA molecules or a synthetic fusing of the crRNA and tracrRNA molecules, a guide RNA. To confer efficient guide RNA expression (or expression of the duplexed crRNA and tracrRNA) in soybean, the soybean U6 polymerase III promoter and U6 polymerase III terminator were used.

[0193] Approximately 0.5 kb genomic DNA sequence upstream of the first G nucleotide of a U6 gene was selected to be used as a RNA polymerase III promoter for example, GM-U6-13.1 promoter (SEQ ID NO:5) or GM-U6-9.1 promoter (SEQ ID NO:6), to express guide RNA to direct Cas9 nuclease to designated genomic site. The guide RNA coding sequence was 76 bp long and comprised a 20 bp variable targeting domain from a chosen soybean genomic target site on the 5′ end and a tract of 4 or more T residues as a transcription terminator on the 3′ end. The first nucleotide of the 20 bp variable targeting domain was a G residue to be used by RNA polymerase III for transcription. Other soybean U6 homologous genes promoters were similarly cloned and used for small RNA expression.

[0194] Since the Cas9 endonuclease and the guide RNA need to form a protein/RNA complex to mediate site-specific DNA double strand cleavage, the Cas9 endonuclease and guide RNA must be expressed in same cells. To improve their co-expression and presence, the Cas9 endonuclease and guide RNA expression cassettes were linked into a single DNA construct.

### Example 2

### Selection of Soybean FAD2 and FAD3 Target Sites to be Cleaved by the Guide RNA/Cas Endonuclease System

[0195] A. guideRNA/Cas9 Endonuclease Target Site Design on the Soybean FAD2-1 and FAD3 Genes.

[0196] There are two seed preferred FAD2-1 genes in soybean (FAD2-1A for Glyma.10g278000 and FAD2-1B for Glyma.20g111000). One guide RNA/Cas9 endonuclease target site (GM-FAD2-1 CR1) was designed to target both the FAD2-1 genes (Table 2). There are also two major FAD3 genes in soybean (FAD3a for Glyma.14g194300 and FAD3b for Glyma.02g227200). The GM-FAD3 CR2 site was designed to target both FAD3 genes (Table 2).

TABLE 2
Guide RNA/Cas9 endonuclease target sites
on soybean FAD2-1 genes and FAD3 genes

| Name of gRNA- | Cas endonuclease | |
|---|---|---|
| Cas9 endonuclease | target sequence | |
| target site | (SEQ ID NO:) | Physical location |
| GM-FAD2-1 CR1 | 7 | Gm10:50014185 . . . 50014166 |
| | | Gm20:35317773 . . . 35317754 |
| GM-FAD3 CR2 | 8 | Gm14:45939600 . . . 445939618 |
| | | Gm02:41423563 . . . 41423581 |

### B. Guide-RNA Expression Cassettes, Cas9 Endonuclease Expression Cassettes and Knockout of the Soybean FAD2-1 and FADS Genes.

[0197] The soybean U6 small nuclear RNA promoter, GM-U6-13.1 (SEQ ID NO: 5) or GM-U6-9.1 promoter (SEQ ID NO:6), was used to express guide RNAs to direct Cas9 nuclease to designated genomic target sites. A soybean codon optimized Cas9 endonuclease with a potato ST-LS1 Intron2 (SEQ ID NO: 1) expression cassette and one or two guide RNA expression cassettes were linked in the binary plasmids. In total, 4 binary vectors were made (FIG. 1A—FIG. 1D). In the RV019927 construct (SEQ ID NO.9) and RV019928 construct (SEQ ID NO.31), the GM-FAD2-1 CR1 gRNA expression cassette and the Cas9 expression cassette was made to target both the FAD2-1A and FAD2-1B genes simultaneously. Similarly, the RV019929 construct (SEQ ID NO.10) and RV019930 construct (SEQ ID NO.32) were made to target the FAD2-1A, FAD2-1B, FAD3a and Fad3b genes at the same time. The binary vectors, such as the RV019927 or RV019928, or RV019929, or RV019930 were transformed into Ochrobactrum haywardense H1-8 strain that has a helper plasmid RV005393 (SEQ ID NO.30) for soybean transformation.

### Example 3

### Delivery of the Guide RNA/Cas9 Endonuclease System DNA to Soybean by Ochro-EA Stable Transformation

[0198] Ochrobactrum-mediated soybean embryonic axis transformation was done essentially as described in US Patent Publication No. 2018/0216123, incorporated herein by reference in its entirety. Mature dry seeds of soybean cultivar 93Y21 were disinfected using chlorine gas and imbibed on semi-solid medium containing 5 g/l sucrose and 6 g/l agar at room temperature in the dark. After an overnight incubation, the seed was soaked in distilled water for an additional 3-4 hrs at room temperature in the dark. Intact embryonic axis were isolated from cotyledon using a scapel blade in distilled sterile water. The embryonic axis explants were transferred to the deep plate with 15 mL of Ochrobactrum haywardense H1-8 containing a helper vector PHP85634 (RV005393) with binary vector RV019927 or RV019928, or RV019929, or RV019930 with suspension at OD600=0.5 in infection medium containing 200 μM acetosyringone. The plates were sealed with parafilm (“Parafilm M” VWR Cat #52858), then sonicated (Sonicator-VWR model 50T) for 30 seconds. After sonication, embryonic axis explants were transferred to a single layer of autoclaved sterile filter paper (VWR #415/Catalog #28320-020). The plates were sealed with Micropore tape (Catalog #1530-0, 3M, St. Paul, Minn.)) and incubated under dim light (5-10 μE/m²/s, cool white fluorescent lamps) for 16 hrs at 21° C. for 3 days.

[0199] After co-cultivation, the embryonic axis explants were cultured on shoot induction medium solidified with 0.7% agar in the absence of selection. The base of the explant (i.e., root radical of embryonic axis) was embedded in the medium. Shoot induction was carried out in a Percival Biological Incubator at 26° C. with a photoperiod of 18 hrs and a light intensity of 40-70 μE/m²/s. 6 to 7 weeks after transformation, elongated shoots (>1-2 cm) were isolated and transferred to rooting medium containing a selection agent. Transgenic plantlets were transferred to soil pots and were grown in the greenhouse.

### Example 4

### Detection of Site-Specific Mutations with NHEJ Mediated by the Guide RNA/Cas9 System in Stably Transformed Soybean

[0200] Genomic DNA was extracted from somatic embryo samples and analyzed by quantitative PCR using a 7500 real time PCR system (Applied Biosystems, Foster City, Calif.) with target site-specific primers and a FAM-labeled fluorescence probe to check copy number changes of the target sites. The qPCR analysis was done in duplex reactions with a syringolide induced protein (SIP) gene as the endogenous control and a wild type 93Y21 genomic DNA sample that contains one copy of the target site with 2 alleles, as the single copy calibrator. The endogenous control probe SIP-T was labeled with VIC (2′-chloro-7′phenyl-1,4-dichloro-6-carboxy-fluorescein) and the gene-specific probes FAD2-T1, FAD2-T2 and FAD3-T2 were labeled with FAM (Fluorescein) (Table 3) for the simultaneous detection of both fluorescent probes (Applied Biosystems). PCR reaction data were captured and analyzed using the sequence detection software provided with the 7500 real time PCR system and the gene copy numbers were calculated using the relative quantification methodology (Applied Biosystems).

TABLE 3
Primers/probes used in qPCR analyses of
transgenic soybean events.

| Target | Primer/ | | SEQ ID |
|---|---|---|---|
| Site | Probe Name | Sequences | NOs: |
| FAD2-1A | FAD2-F1 | TCGTGTGGCCAAAGTGGAA | 11 |
| | FAD2-R1 | TTTGTGTTTGGAACCCTTGAGA | 12 |
| | FAD2-T1 | TTCAAGGGAAGAAGCC | 13 |
| | (FAM-MGB) | | |
| FAD2-1B | FAD2-F2 | CCGTGTGGCCAAAGTTGAA | 14 |
| | FAD2-R1 | TTTGTGTTTGGAACCCTTGAGA | 12 |
| | FAD2-T2 | TTCAGCAGAAGAAGCC | 15 |
| | (FAM-MGB) | | |
| FAD3a | FAD3-F1 | TAATGGATACCAAAAGGAAGC | 16 |
| | FAD3-R2 | CAAGCACATCCCTGAGAACATAA | 17 |
| | | C | |
| | FAD3-T2 | AATCCATGGAGATCCCT | 18 |
| | (FAM-MGB | | |
| FAD3b | FAD3-F2 | ATACCAACAAAAGGGTTCTTC | 19 |
| | FAD3-R2 | CAAGCACATCCCTGAGAACATAA | 17 |
| | | C | |
| | FAD3-T2 | AATCCATGGAGATCCCT | 18 |
| | (FAM-MGB) | | |
| SIP | SIP-130F | TTCAAGTTGGGCTTTTTCAGAAG | 20 |
| | SIP-198R | TCTCCTTGGTGCTCTCATCACA | 21 |
| | SIP-170T | CTGCAGCAGAACCAA | 22 |
| | (VIC-MGB) | | |

[0201] Since the wild type 93Y21 genomic DNA with two alleles of the target site was used as the single copy calibrator, events without any change of the target site would be detected as one copy herein termed Wt-Homo (qPCR value >=0.7), events with one allele changed, which is no longer detectible by the target site-specific qPCR, would be detected as half copy herein termed NHEJ-Hemi (qPCR value between 0.1 and 0.7), while events with both alleles changed would be detected as null herein termed NHEJ-Null (qPCR value=<0.1).

[0202] In total, four soybean transformation experiments were carried out with the vectors shown FIG. 1A-FIG. 1D. In RV019927 and RV019929, the gRNA cassettes were near the right border and placed upstream of the Cas9 expression cassettes in the binary vectors. In contrast, in RV019928 and RV019930, the gRNA expression cassettes were near the left border and placed downstream of the Cas9 expression cassettes in the binary vectors. As shown in Table 4, Table 5 and FIG. 2, for the two experiments to knockout only the two FAD2-1 genes, the gRNA near the right border and placed upstream of Cas9 configuration design provided much higher gene knockout efficiency as compared to the design with the gRNA near the left border and placed downstream of Cas9. For example, the bi-allelic (NHEJ-Null) knockout efficiency reached 63% for the FAD2-1A gene and 56% for the FAD2-1B gene (Table 4) with the RV019927 vector. The bi-allelic (NHEJ-Null) knockout efficiency was only 7% for the FAD2-1 gene and 10% for the FAD2-1B gene (Table 5) with the RV019928 vector. The WT population only made up about 2-3% in the experiment with the RV019927 vector, as compared to 37-44% in the experiment with the RV019928 vector.

[0203] In the third and fourth experiments, either the RV019929 or RV019930 binary vectors was used to knockout the two FAD2-1 genes and the two FAD3 genes. As shown in Table 4, Table 5 and FIG. 2, these two experiments also demonstrated that RV019929 vector design, with the gRNA expression cassette near the right border and upstream of the Cas9 expression cassette, provided much higher quadra gene knockout efficiency as compared to the RV019930 binary vector in the FAD2-1A, FAD2-1B, FAD3a and FAD3b genes. These unexpected results demonstrated the different gRNA/Cas9 expression cassette configurations in the binary vectors had dramatic effects on the target gene editing efficiency. Vectors with gRNA cassettes near the right border and placed upstream of the Cas9 expression cassettes increased the efficiency of editing the target site.

TABLE 4
FAD2-1 Target Site Mutations Induced by the Guide RNA/Cas9
system in 93Y21 with RV019927. Numbers indicate no.
of events (numbers in parentheses are %).

| | Total | Wt-Homo | NHEJ-Hemi | NHEJ-Null |
|---|---|---|---|---|
| Target site | events | (%) | (%) | (%) |
| FAD2-1A | 106 | 2 (2%) | 37 (35%) | 67 (63%) |
| FAD2-1B | | 3 (3%) | 44 (42%) | 59 (56%) |

TABLE 5
FAD2-1 Target Site Mutations Induced by the Guide RNA/Cas9
system in 93Y21 with RV019928. Numbers indicate no.
of events (numbers in parentheses are %).

| | Total | Wt-Homo | NHEJ-Hemi | NHEJ-Null |
|---|---|---|---|---|
| Target site | event | (%) | (%) | (%) |
| FAD2-1A | 41 | 15 (37%) | 23 (56%) | 3 (7%) |
| FAD2-1B | | 18 (44%) | 19 (46%) | 4 (10%) |

TABLE 6
FAD2-1 and FAD3 Target Site Mutations Induced by
the Guide RNA/Cas9 system in 93Y21 with RV019929.
Numbers indicate no. of events (numbers in parentheses
are % of the total analyzed events).

| | Total | Wt-Homo | NHEJ-Hemi | NHEJ-Null |
|---|---|---|---|---|
| Target Site | event | (%) | (%) | (%) |
| FAD2-1A | 27 | 0 (0%) | 11 (41%) | 16 (59%) |
| FAD2-1B | | 1 (4%) | 12 (44%) | 14 (52%) |
| FAD3a | | 1 (4%) | 6 (22%) | 20 (74%) |
| FAD3b | | 1 (4%) | 4 (15%) | 22 (81%) |

TABLE 7
FAD2-1 and FAD3 Target Site Mutations Induced by
the Guide RNA/Cas9 system in 93Y21 with RV019930.
Numbers indicate no. of events (numbers in parentheses
are % of the total analyzed events).

| | Total | Wt-Homo | NHEJ-Hemi | NHEJ-Null |
|---|---|---|---|---|
| Target Site | event | (%) | (%) | (%) |
| FAD2-1A | 42 | 20 (48%) | 17 (40%) | 5 (12%) |
| FAD2-1B | | 7 (17%) | 32 (76%) | 3 (7%) |
| FAD3a | | 7 (17%) | 32 (76%) | 3 (7%) |
| FAD3b | | 12 (29%) | 22 (52%) | 8 (19%) |

[0204] The target regions of NHEJ-Null events were amplified by regular PCR from the same genomic DNA samples using primers specific respectively to FAD2-1A, FAD2-1B, FAD3a and FAD3b genes (Table 8).

TABLE 8
PCR primers for the gRNA targets of the FAD2-1 and FAD3 genes

| Target Site | Primer1 | SEQ ID NO: | Primer2 | SEQ ID NO: |
|---|---|---|---|---|
| FAD2-1A | WOL1007 | 23 | WOL1009 | 25 |
| FAD2-1B | WOL1008 | 24 | WOL1009 | 25 |
| FAD3a | WOL1100 | 26 | WOL1101 | 27 |
| FAD3b | WOL1102 | 28 | WOL1103 | 29 |

[0205] The PCR bands were cloned into pCR2.1 vector using a TOPO-TA cloning kit (Invitrogen) and multiple clones were sequenced to check for target site sequence changes as the results of NHEJ. Various small deletions near the Cas9 cleavage site, 3 bp upstream of the PAM, were revealed at all four tested target sites, with most of them resulting in frame-shift knockouts (FIG. 3A-FIG. 3B, FIG. 4A-FIG. 4B, FIG. 5A-FIG. 5B). These sequence analyses confirmed the occurrence of NHEJ mediated by the guide RNA/Cas9 system at the specific Cas9 target sites.

### Example 5

### Soybean Vectors for SDN2 and SDN3

[0206] The T-DNA vectors used in the Cas9 soybean experiments were Vectors 9-17, depicted in FIGS. 7A-7I and FIGS. 8-16, and given as SEQ ID NOs: 97-105, respectively. The lengths of the homology region “arms” (HR1 and HR2) in each vector ranged from 591 to 980 nucleotides in length.

### Example 6

### Soy Transformation

[0207] Exemplary protocols for Agrobacterium-mediated transformation disclosed in Jia et al., 2015, Int J. Mol. Sci. 16:18552-18543 and US20170121722 and incorporated herein by reference in their entireties), or Ochrobactrum-mediated transformation, disclosed in US20180216123A1 and incorporated herein by reference in its entirety, for soybean can be used with the methods of the disclosure.

[0208] Soybean transformation was done essentially as described in US20180216123A1 and in US20170121722 and incorporated herein by reference in their entireties or as described by Paz et al. ((2006) Plant Cell Rep 25:206-213) and U.S. Pat. No. 7,473,822 and incorporated herein by reference in its entirety. Mature seed from soybean lines were surface-sterilized for 16 hrs using chlorine gas, produced by mixing 3.5 mL of 12 N HCl with 100 mL of commercial bleach (5.25% sodium hypochloride), as described by Di et al. ((1996) Plant Cell Rep 15:746-750). Disinfected seeds were soaked in sterile distilled water at room temperature for 16 hrs (100 seeds in a 25×100 mm petri dish).

[0209] A volume of 10 mL of Ochrobactrum haywardense H1 NRRL Deposit B-67078, disclosed in US20180216123A1 and incorporated herein by reference in its entirety, further containing vector PHP70365 (SEQ ID NO: 108) suspension at OD600=0.5 in infection medium containing 300 μM acetosyringone was added to the soaked seeds. The seeds were then split by cutting longitudinally along the hilum to separate the cotyledons, and the seed coats, primary shoots, and embryonic axes were removed from the Ochrobactrum haywardense H1 NRRL Deposit B-67078 suspension, thereby generating half-seed explants.

[0210] The half-seed explants were placed flat side down in a deep plate with 4 mL fresh Ochrobactrum/infection media with no overlapping of cotyledons. The plates were sealed with parafilm (“Parafilm M” VWR Cat #52858), then sonicated (Sonicator-VWR model 50T) for 30 seconds. After sonication, half-seed explants were transferred to a single layer of autoclaved sterile filter paper (VWR #415/Catalog #28320-020) onto co-cultivation solid medium (18-22 explants per plate; flat side down). The plates were sealed with Micropore tape (Catalog #1530-0, 3M, St. Paul, Minn.)) and incubated under dim light (5-10 μE/m²/s, cool white fluorescent lamps) for 16 hrs at 21° C. for 5 days.

### Example 7

### Soy Regeneration

[0211] Methods were carried out according to those disclosed in US20180216123A1, incorporated herein by reference in its entirety. After co-cultivation, the half-seed explants were washed in liquid shoot induction (SI) medium once then the explants were cultured on shoot induction medium solidified with 0.7% agar in the absence of selection (Table 10 of US20180216123A1, incorporated herein by reference in its entirety). The base of the explant (i.e., the part of the explant from where the embryonic axis was removed) was embedded in the medium, facing upwards. Shoot induction was carried out in a Percival Biological Incubator at 24° C. with a photoperiod of 18 hrs and a light intensity of 130-160 μE/m²/s. After 14 days, the explants were transferred to fresh shoot induction medium containing 3 mg/L bialaphos (Table 10 of US20180216123A1, incorporated herein by reference in its entirety). The half seed explants were transferred to fresh medium every two weeks. After four weeks of culture on shoot induction medium, explants were transferred to shoot elongation (SE) medium containing 5 mg/L bialaphos (Table 10 of US20180216123A1, incorporated herein by reference in its entirety). Six to ten weeks later, elongated shoots (>1-2 cm) were isolated and transferred to rooting medium (Table 10 of US20180216123A1, incorporated herein by reference in its entirety) containing 1 mg/L bialaphos.

### Example 8

### Analysis of HDR Frequency

### Soybean SDN3

[0212] Ochrobactrum and Agrobacterium-mediated transformation and plant regeneration were performed as described in Examples 6 and 7. Several rapid testing experiments were conducted to evaluate feasibility of these improved SDN3 methods in soybean. Soybean embryonic axis infected with Ochrobactrumcontaining SDN3 donor in transformation vectors, Vector 9 (FIG. 7A, FIG. 8, and FIG. 17A) and Vector 10 (FIG. 7B, FIG. 9, and FIG. 18A), were sampled after 7 days for DNA extraction. Digital droplet PCR (ddPCR) for the HR2 junction revealed a positive signal for HDR using Vector 9 and Vector 10 while no HDR signal was detected from the control vector (FIGS. 17B-C and 18B-C, respectively).

[0213] T0 soybean plants transgenic to vector Vector 12 (FIG. 11 and FIG. 20) were regenerated using the Spectinomycin (SPCN) gene as a selectable marker and analyzed by junction qPCR for targeted SDN3 insertion. 2×HDR positive events were further analyzed by sequencing to evaluate the size and integrity of the insertion. Table 9 shows the results.

TABLE 9
Frequencies of HDR-facilitated targeted SDN3 polynucleotide
modification edits at a target site in soy. Frequencies
are calculated based on the total number of plants
analyzed in each experiment.

| | Plants analyzed | 2X HDR | Frequency |
|---|---|---|---|
| Batch 1 | 222 | 7 | 3.2% |
| Batch 2 | 244 | 5 | 2% |
| Total | 466 | 12 | 2.6% |

[0214] Soybean leaf explants from seedlings of two different genotypes were infected and co-cultivated for 3 days with Agrobacterium containing SDN3 donor in transformation vectors, Vector 14 (FIG. 7F, FIG. 13) and Vector 15 (FIG. 7G, FIG. 14). Leaf samples were sampled after 7 days for DNA extraction. Digital droplet PCR (ddPCR) for the HR2 junction revealed positive signal for HDR from both vectors (FIG. 21 for Vector 14; FIG. 22 for Vector 15).

### Soybean SDN2

[0215] TO soybean plants transgenic to Vector 13 (FIG. 7E, FIG. 12, and FIG. 19A) were regenerated using the Spectinomycin (SPCN) gene as a selectable marker and analyzed by junction qPCR for targeted SDN2 insertion. 2×HDR positive events were further analyzed by sequencing to evaluate the size and integrity of the insertion. Of 1358 plants analyzed, 8 demonstrated editing, for a frequency of 0.6%. FIGS. 19C and 19D show sequence verification of the edits. Results are shown in Table 10.

TABLE 10
Frequencies of HDR-facilitated targeted SDN2 polynucleotide
modification edits at a target site in soy. Frequencies
are calculated based on the total number of plants
analyzed in each experiment.

| Plants analyzed | Edited | Frequency |
|---|---|---|
| 1358 | 8 | 0.6% |

[0216] These examples demonstrated robust Ochrobactrum- and Agrobacterium-mediated SDN2 and SDN3 systems in soybean with donor DNA cassette flanking with target sites resulting in releasing the donor DNA molecule from the T-DNA. The technological advances in SDN2 and SDN3 systems were made without using a selectable marker gene inside the donor template. Other types of genome modifications, such as targeted nucleotide editing and gene replacement (swap), will also benefit from this approach.

### Example 9

### Additional Methods

[0217] Efficient release of the donor DNA polynucleotide can be promoted by several methods. In one method, a plurality (n) of sets of sequences can be incorporated flanking the donor DNA cassette (one depiction for n=2 is depicted in FIG. 6), which allows multiple opportunities for cleavage from a Cas endonuclease/guide RNA complex. In some aspects, two sets of sequences flank the donor DNA cassette. In some aspects, three sets of sequences flank the donor DNA cassette. In some aspects, four or more sets of sequences flank the donor DNA cassette. The number of sets for the plurality may be n=2, 3, 4, 5, 6, 7, 8, 9, 10, or greater than 10.

[0218] Methods to improve the frequency of HDR at a target site may also include a donor/template cassette that has one target site outside of the cassette, instead of two sites flanking the cassette. This results in a “hanging” template/donor fragment provided to the target polynucleotide at or near the double-strand break site.

[0219] The foregoing disclosure has been described in detail by way of illustration and example for purposes of clarity and understanding. As is readily apparent to one skilled in the art, the foregoing are only some of the methods and compositions that illustrate the embodiments of the foregoing disclosure. It will be apparent to those of ordinary skill in the art that variations, changes, modifications, and alterations may be applied to the compositions and/or methods described herein without departing from the true spirit, concept, and scope of the disclosure.

[0220] All publications, patents, and patent applications mentioned in the specification are incorporated by reference herein for the purpose cited to the same extent as if each was specifically and individually indicated to be incorporated by reference herein.

[0221] As used herein and in the appended claims, the singular forms “a”, “an”, and “the” include plural reference unless the context clearly dictates otherwise. Thus, for example, reference to “a plant” includes a plurality of such plants, reference to “a cell” includes one or more cells and equivalents thereof known to those skilled in the art, and so forth. Unless expressly stated to the contrary, “or” is used as an inclusive term. For example, a condition A or B is satisfied by any one of the following: A is true (or present) and B is false (or not present), A is false (or not present) and B is true (or present), and both A and B are true (or present).

1. A method for increasing the efficiency of editing a target site in a plant, the method comprising:
(a) providing to a plant cell an editing T-DNA, wherein the editing T-DNA comprises in operable linkage from a right border to a left border orientation, a guide RNA expression cassette wherein, the guide RNA expression cassette comprises a regulatory element operably linked to a polynucleotide encoding a guide RNA, wherein the guide RNA is complementary to the target site, and a Cas endonuclease expression cassette, wherein the Cas endonuclease expression cassette comprises a regulatory element operably linked to a Cas endonuclease, wherein the guide RNA and the Cas endonuclease are capable of forming a complex that enables the Cas endonuclease to introduce cleavage at the target site;
(b) identifying at least one plant cell of (a) that has a modification at the target site, wherein the modification includes at least one deletion or substitution of one or more nucleotides at the target site; and
(c) regenerating a plant from the at least one plant cell of (b) having the modification at the target site having increased editing efficiency when compared to a control plant having a modification at the target site provided by a control plant editing T-DNA, wherein the control plant editing T-DNA comprises in operable linkage from a right border to a left border orientation, a Cas endonuclease expression cassette, wherein the Cas endonuclease expression cassette comprises a regulatory element operably linked to a Cas endonuclease and a guide RNA expression cassette wherein, the guide RNA expression cassette comprises a regulatory element operably linked to a polynucleotide encoding a guide RNA, wherein the guide RNA is complementary to the target site and wherein the guide RNA and the Cas endonuclease are capable of forming a complex that enables the Cas endonuclease to introduce cleavage at the target site.

2. A method of increasing the efficiency of altering the fatty acid profile in the seed of a plant, the method comprising:
(a) providing to a plant cell an editing T-DNA, wherein the editing T-DNA comprises in operable linkage from a right border to a left border orientation, a guide RNA expression cassette wherein, the guide RNA expression cassette comprises a regulatory element operably linked to a polynucleotide encoding a guide RNA, wherein the guide RNA is complementary a FAD2 genomic sequence in the plant genome, a FAD3 genomic sequence in the plant genome, or a combination thereof, and a Cas endonuclease expression cassette, wherein the Cas endonuclease expression cassette comprises a regulatory element operably linked to a Cas endonuclease, wherein the guide RNA and the Cas endonuclease are capable of forming a complex that enables the Cas endonuclease to introduce cleavage in the FAD2 genomic sequence in the plant genome, the FAD3 genomic sequence in the plant genome, or a combination thereof;
(b) obtaining a plant from the plant cell of (a);
(c) evaluating the plant of (b) for the presence of the at least one nucleotide modification;
(d) selecting a progeny plant of (c) having an altered fatty acid profile; and
(e) obtaining seed from the progeny plant of (d) having increased editing efficiency when compared to a control seed of a plant having a modification of the FAD2 genomic sequence, the FAD3 genomic sequence, or the combination thereof provided by a control seed editing T-DNA, wherein the control seed editing T-DNA comprises in operable linkage from a right border to a left border orientation, a Cas endonuclease expression cassette, wherein the Cas endonuclease expression cassette comprises a regulatory element operably linked to a Cas endonuclease and a guide RNA expression cassette wherein, the guide RNA expression cassette comprises a regulatory element operably linked to a polynucleotide encoding a guide RNA, wherein the guide RNA is complementary a FAD2 genomic sequence in the plant genome, a FAD3 genomic sequence in the plant genome, or a combination thereof wherein the guide RNA and the Cas endonuclease are capable of forming a complex that enables the Cas endonuclease to introduce cleavage in the FAD2 genomic sequence in the plant genome, the FAD3 genomic sequence in the plant genome, or a combination thereof.

3. A method of increasing the efficiency of altering the fatty acid profile in the seed of a plant, the method comprising:
(a) providing to a plant cell an editing T-DNA, wherein the editing T-DNA comprises in operable linkage from a right border to a left border orientation, a guide RNA expression cassette wherein, the guide RNA expression cassette comprises a regulatory element operably linked to a polynucleotide encoding a guide RNA, wherein the guide RNA is complementary a FAD2 genomic sequence in the plant genome, a FAD3 genomic sequence in the plant genome, or a combination thereof, and a Cas endonuclease expression cassette, wherein the Cas endonuclease expression cassette comprises a regulatory element operably linked to a Cas endonuclease, wherein the guide RNA and the Cas endonuclease are capable of forming a complex that enables the Cas endonuclease to introduce cleavage within the FAD2 genomic sequence in the plant genome, the FAD3 genomic sequence in the plant genome, or a combination thereof;
(b) obtaining a plant from the plant cell of (a);
(c) evaluating the plant of (b) for the presence of the at least one nucleotide modification;
(d) screening a progeny plant of (c) having an altered fatty acid profile that is void of the guide RNA and the Cas endonuclease; and
(e) obtaining seed from the progeny plant of (d) having increased editing efficiency when compared to a control seed of a plant having a modification of the FAD2 genomic sequence, the FAD3 genomic sequence, or the combination thereof provided by a control seed editing T-DNA, wherein the control seed editing T-DNA comprises in operable linkage from a right border to a left border orientation, a Cas endonuclease expression cassette, wherein the Cas endonuclease expression cassette comprises a regulatory element operably linked to a Cas endonuclease and a guide RNA expression cassette wherein, the guide RNA expression cassette comprises a regulatory element operably linked to a polynucleotide encoding a guide RNA, wherein the guide RNA is complementary a FAD2 genomic sequence in the plant genome, a FAD3 genomic sequence in the plant genome, or a combination thereof, and wherein the guide RNA and the Cas endonuclease are capable of forming a complex that enables the Cas endonuclease to introduce cleavage within the FAD2 genomic sequence in the plant genome, the FAD3 genomic sequence in the plant genome, or a combination thereof.

4. A method for increasing the efficiency of introducing a nucleotide of interest into a target site in the genome of a plant, the method comprising:
(a) providing to a plant cell an editing T-DNA, wherein the editing T-DNA comprises in operable linkage from a right border to a left border orientation, a guide RNA expression cassette wherein, the guide RNA expression cassette comprises a regulatory element operably linked to a polynucleotide encoding a guide RNA and a Cas endonuclease expression cassette, wherein the Cas endonuclease expression cassette comprises a regulatory element operably linked to a Cas endonuclease, wherein the guide RNA and the Cas endonuclease are capable of forming a complex that enables the Cas endonuclease to cleavage at the target site;
(b) contacting the plant cell of (a) with a donor DNA comprising the polynucleotide of interest;
(c) identifying at least one plant cell from (b) comprising in its genome the polynucleotide of interest integrated at the target site; and
(d) regenerating a plant from the at least one plant cell having in its genome the polynucleotide of interest integrated at the target site having increased efficiency of introduction of the polynucleotide of interest into the target site in the genome of the plant cell when compared to a control plant having an introduction of the polynucleotide of interest into the target site in the genome of the plant cell provided by a control plant editing T-DNA, wherein the control plant editing T-DNA comprises in operable linkage from a right border to a left border orientation, a Cas endonuclease expression cassette, wherein the Cas endonuclease expression cassette comprises a regulatory element operably linked to a Cas endonuclease and a guide RNA expression cassette wherein, the guide RNA expression cassette comprises a regulatory element operably linked to a polynucleotide encoding a guide RNA, wherein the guide RNA and the Cas endonuclease are capable of forming a complex that enables the Cas endonuclease to cleavage at the target site.

5. The method of claim 1, the method further comprising a trait of interest or a nucleotide modification template cassette, wherein the trait of interest or nucleotide modification template cassette comprises at least one nucleotide modification of the trait of interest or nucleotide and the trait of interest or nucleotide modification template cassette is capable of making at the least one nucleotide modification at the target site of the trait of interest or the nucleotide.

6. The method of claim 2, the method further comprising a modification template cassette, wherein the modification template cassette comprises at least one nucleotide modification of a FAD2 genomic sequence in the plant genome, a FAD3 genomic sequence in the plant genome, or a combination thereof and the modification template cassette enables the at least one nucleotide modification of the FAD2 genomic sequence in the plant genome, the FAD3 genomic sequence in the plant genome, or the combination thereof.

7. The method of claim 1, wherein the target site is selected from the group consisting of a promoter sequence, a terminator sequence, a regulatory element sequence, a coding sequence, a splice site, a polyubiquitination site, an intron site, an intron enhancing motif, a gene of interest, and a trait of interest.

8. The method of claim 1, wherein the target site is selected from the group consisting of a polynucleotide encoding selectable marker resistance, disease resistance, drought tolerance, heat tolerance, cold tolerance, salinity tolerance, metal tolerance, herbicide tolerance, improved water use efficiency, improved nitrogen utilization, improved nitrogen fixation, pest resistance, herbivore resistance, pathogen resistance, yield improvement, health enhancement, vigor improvement, growth improvement, photosynthetic capability improvement, nutrition enhancement, altered protein composition, altered oil composition, increased biomass, increased shoot length, increased root length, improved root architecture, modulation of a metabolite, modulation of the proteome, increased seed weight, altered seed carbohydrate composition, altered seed oil composition, altered fatty acid profile, altered seed protein composition, altered seed nutrient composition, improved fertility, improved fecundity, improved environmental tolerance, improved vigor, improved disease resistance, improved disease tolerance, improved tolerance to a heterologous molecule, improved fitness, improved physical characteristic, greater mass, increased production of a biochemical molecule, decreased production of a biochemical molecule, upregulation of a gene, downregulation of a gene, upregulation of a biochemical pathway, downregulation of a biochemical pathway, stimulation of cell reproduction, and suppression of cell reproduction.

9. The method of claim 8, wherein the polynucleotide encodes an altered fatty acid profile.

10. The method of claim 1, wherein the plant is a monocot or a dicot.

11. The method of claim 10, wherein the monocot is selected from the group consisting of maize, rice, sorghum, rye, barley, wheat, millet, oats, sugarcane, turfgrass, and switchgrass.

12. The method of claim 10, wherein the dicot is selected from the group consisting of soybean, canola, alfalfa, sunflower, cotton, tobacco, peanut, potato, tobacco, Arabidopsis, and safflower.

13. The method of claim 1, wherein the editing T-DNA provided to the plant cell is provided via Agrobacterium-mediated transformation.

14. The method of claim 1, wherein the editing T-DNA provided to the plant cell is provided via Ochrobactrum-mediated transformation.

15. The method of claim 1, wherein the editing T-DNA provided to the plant cell is provided via Rhizobiaceae-mediated transformation.

16. The method of claim 1, wherein the guide RNA is operably linked to a plant U6 polymerase III promoter.

17. The method of claim 1, wherein the Cas endonuclease is a plant optimized Cas9 endonuclease.

18. The method of claim 1, wherein the Cas endonuclease gene is operably linked to a nuclear targeting signal upstream of the Cas coding region and a nuclear localization signal downstream of the Cas coding region.

19. The method of claim 1, wherein the target site is located in the gene sequence of a FAD2 gene, a FAD3 gene, or a combination thereof.

20. A plant, plant cell, or seed produced by the method of claim 1.

21. A plant comprising an edited trait of interest, wherein the plant originates from a plant cell comprising an edited trait of interest produced by the method of claim 1.

22. The method of claim 1, wherein the editing T-DNA further comprises a selectable marker expression cassette, a color marker expression cassette, or a combination thereof.

23. The method of claim 1, wherein the Cas endonuclease is expressed by SEQ ID NO:1.

24. A recombinant DNA construct for increasing editing comprising an editing T-DNA for a trait or polynucleotide of interest, wherein the editing T-DNA comprises in operable linkage from a right border to a left border orientation, a guide RNA expression cassette, wherein the guide RNA expression cassette comprises a regulatory element operably linked to a polynucleotide encoding a guide RNA, wherein the guide RNA is complementary to the trait or polynucleotide of interest and a Cas endonuclease expression cassette, wherein the Cas endonuclease expression cassette comprises a regulatory element operably linked to a Cas endonuclease, wherein the guide RNA and the Cas endonuclease are capable of forming a complex that enables the Cas endonuclease cleavage in the trait or polynucleotide of interest.

25. The recombinant DNA construct of claim 24, further comprising a trait or polynucleotide of interest modification template cassette, wherein the trait or polynucleotide of interest modification template cassette comprises at least one nucleotide modification of the trait or polynucleotide of interest and the trait or polynucleotide of interest modification template cassette is capable of making at the least one nucleotide modification in the trait or polynucleotide of interest.

26. The recombinant DNA construct of claim 24, further comprises a selectable marker expression cassette, a color marker expression cassette, or a combination thereof.

27. A plant comprising a modified nucleotide sequence, wherein the modified nucleotide sequence was produced by providing to a plant cell an editing T-DNA, wherein the editing T-DNA comprises in operable linkage from a right border to a left border orientation, a guide RNA expression cassette wherein, the guide RNA expression cassette comprises a regulatory element operably linked to a polynucleotide encoding a guide RNA, wherein the guide RNA is complementary the nucleotide sequence and a Cas endonuclease expression cassette, wherein the Cas endonuclease expression cassette comprises a regulatory element operably linked to a Cas endonuclease, wherein the guide RNA and the Cas endonuclease are capable of forming a complex that enables the Cas endonuclease to introduce cleavage in the nucleotide sequence.

28. The plant of claim 27, wherein the editing T-DNA further comprises a nucleotide modification template cassette, wherein the nucleotide modification template cassette comprises at least one nucleotide modification of the nucleotide sequence and the nucleotide modification template cassette is capable of making at the least one nucleotide modification in the nucleotide sequence.

29. A plant comprising a modified nucleotide sequence, wherein the modified nucleotide sequence was produced by providing to a plant cell an editing T-DNA, wherein the editing T-DNA comprises in operable linkage from a right border to a left border orientation, a guide RNA expression cassette wherein, the guide RNA expression cassette comprises a regulatory element operably linked to a polynucleotide encoding a guide RNA, wherein the guide RNA is complementary a FAD2 genomic sequence in the plant genome, a FAD3 genomic sequence in the plant genome, or a combination thereof and a Cas endonuclease expression cassette, wherein the Cas endonuclease expression cassette comprises a regulatory element operably linked to a Cas endonuclease, wherein the guide RNA and the Cas endonuclease are capable of forming a complex that enables the Cas endonuclease to introduce cleavage in the FAD2 genomic sequence in the plant genome, the FAD3 genomic sequence in the plant genome, or a combination thereof.

30. The plant of claim 29, wherein the editing T-DNA further comprises a polynucleotide modification template cassette, wherein the polynucleotide modification template cassette comprises at least one nucleotide modification of a FAD2 genomic sequence in the plant genome, a FAD3 genomic sequence in the plant genome, or a combination thereof, and the polynucleotide modification template cassette enables the at least one nucleotide modification of the FAD2 genomic sequence in the plant genome, the FAD3 genomic sequence in the plant genome, or the combination thereof.

31. The plant of claim 27 or 29, wherein the plant is a monocot or a dicot.

32. The plant of claim 31, wherein the monocot is selected from the group consisting of maize, rice, sorghum, rye, barley, wheat, millet, oats, sugarcane, turfgrass, and switchgrass.

33. The plant of claim 31, wherein the dicot is selected from the group consisting of soybean, canola, alfalfa, sunflower, cotton, tobacco, peanut, potato, tobacco, Arabidopsis, and safflower.

34. The method of claim 3, the method further comprising a modification template cassette, wherein the modification template cassette comprises at least one nucleotide modification of a FAD2 genomic sequence in the plant genome, a FAD3 genomic sequence in the plant genome, or a combination thereof and the modification template cassette enables the at least one nucleotide modification of the FAD2 genomic sequence in the plant genome, the FAD3 genomic sequence in the plant genome, or the combination thereof.

35. The method of claim 4, wherein the target site is selected from the group consisting of a promoter sequence, a terminator sequence, a regulatory element sequence, a coding sequence, a splice site, a polyubiquitination site, an intron site, an intron enhancing motif, a gene of interest, and a trait of interest.

36. The method of claim 4, wherein the target site is selected from the group consisting of a polynucleotide encoding selectable marker resistance, disease resistance, drought tolerance, heat tolerance, cold tolerance, salinity tolerance, metal tolerance, herbicide tolerance, improved water use efficiency, improved nitrogen utilization, improved nitrogen fixation, pest resistance, herbivore resistance, pathogen resistance, yield improvement, health enhancement, vigor improvement, growth improvement, photosynthetic capability improvement, nutrition enhancement, altered protein composition, altered oil composition, increased biomass, increased shoot length, increased root length, improved root architecture, modulation of a metabolite, modulation of the proteome, increased seed weight, altered seed carbohydrate composition, altered seed oil composition, altered fatty acid profile, altered seed protein composition, altered seed nutrient composition, improved fertility, improved fecundity, improved environmental tolerance, improved vigor, improved disease resistance, improved disease tolerance, improved tolerance to a heterologous molecule, improved fitness, improved physical characteristic, greater mass, increased production of a biochemical molecule, decreased production of a biochemical molecule, upregulation of a gene, downregulation of a gene, upregulation of a biochemical pathway, downregulation of a biochemical pathway, stimulation of cell reproduction, and suppression of cell reproduction.

37. The method of claim 36, wherein the polynucleotide encodes an altered fatty acid profile.

38. The method of claim 2, wherein the plant is a monocot or a dicot.

39. The method of claim 3, wherein the plant is a monocot or a dicot.

40. The method of claim 4, wherein the plant is a monocot or a dicot.

41. The method of claim 38, wherein the monocot is selected from the group consisting of maize, rice, sorghum, rye, barley, wheat, millet, oats, sugarcane, turfgrass, and switchgrass.

42. The method of claim 38, wherein the dicot is selected from the group consisting of soybean, canola, alfalfa, sunflower, cotton, tobacco, peanut, potato, tobacco, Arabidopsis, and safflower.

43. The method of claim 39, wherein the monocot is selected from the group consisting of maize, rice, sorghum, rye, barley, wheat, millet, oats, sugarcane, turfgrass, and switchgrass.

44. The method of claim 39, wherein the dicot is selected from the group consisting of soybean, canola, alfalfa, sunflower, cotton, tobacco, peanut, potato, tobacco, Arabidopsis, and safflower.

45. The method of claim 40, wherein the monocot is selected from the group consisting of maize, rice, sorghum, rye, barley, wheat, millet, oats, sugarcane, turfgrass, and switchgrass.

46. The method of claim 40, wherein the dicot is selected from the group consisting of soybean, canola, alfalfa, sunflower, cotton, tobacco, peanut, potato, tobacco, Arabidopsis, and safflower.

47. The method of claim 2, wherein the editing T-DNA provided to the plant cell is provided via Agrobacterium-mediated transformation.

48. The method of claim 3, wherein the editing T-DNA provided to the plant cell is provided via Agrobacterium-mediated transformation.

49. The method of claim 4, wherein the editing T-DNA provided to the plant cell is provided via Agrobacterium-mediated transformation.

50. The method of claim 2, wherein the editing T-DNA provided to the plant cell is provided via Ochrobactrum-mediated transformation.

51. The method of claim 3, wherein the editing T-DNA provided to the plant cell is provided via Ochrobactrum-mediated transformation.

52. The method of claim 4, wherein the editing T-DNA provided to the plant cell is provided via Ochrobactrum-mediated transformation.

53. The method of claim 2, wherein the editing T-DNA provided to the plant cell is provided via Ochrobactrum-mediated transformation.

54. The method of claim 3, wherein the editing T-DNA provided to the plant cell is provided via Rhizobiaceae-mediated transformation.

55. The method of claim 4, wherein the editing T-DNA provided to the plant cell is provided via Rhizobiaceae-mediated transformation.

56. The method of claim 2, wherein the editing T-DNA provided to the plant cell is provided via Rhizobiaceae-mediated transformation.

57. The method of claim 3, wherein the editing T-DNA provided to the plant cell is provided via Rhizobiaceae-mediated transformation.

58. The method of claim 4, wherein the guide RNA is operably linked to a plant U6 polymerase III promoter.

59. The method of claim 2, wherein the guide RNA is operably linked to a plant U6 polymerase III promoter.

60. The method of claim 3, wherein the guide RNA is operably linked to a plant U6 polymerase III promoter.

61. The method of claim 4, wherein the guide RNA is operably linked to a plant U6 polymerase III promoter.

62. The method of claim 2, wherein the Cas endonuclease is a plant optimized Cas9 endonuclease.

63. The method of claim 3, wherein the Cas endonuclease is a plant optimized Cas9 endonuclease.

64. The method of claim 4, wherein the Cas endonuclease is a plant optimized Cas9 endonuclease.

65. The method of claim 2, wherein the Cas endonuclease gene is operably linked to a nuclear targeting signal upstream of the Cas coding region and a nuclear localization signal downstream of the Cas coding region.

66. The method of claim 3, wherein the Cas endonuclease gene is operably linked to a nuclear targeting signal upstream of the Cas coding region and a nuclear localization signal downstream of the Cas coding region.

67. The method of claim 4, wherein the Cas endonuclease gene is operably linked to a nuclear targeting signal upstream of the Cas coding region and a nuclear localization signal downstream of the Cas coding region.

68. The method of claim 17, wherein the Cas endonuclease gene is operably linked to a nuclear targeting signal upstream of the Cas coding region and a nuclear localization signal downstream of the Cas coding region.

69. The method of claim 62, wherein the Cas endonuclease gene is operably linked to a nuclear targeting signal upstream of the Cas coding region and a nuclear localization signal downstream of the Cas coding region.

70. The method of claim 63, wherein the Cas endonuclease gene is operably linked to a nuclear targeting signal upstream of the Cas coding region and a nuclear localization signal downstream of the Cas coding region.

71. The method of claim 64, wherein the Cas endonuclease gene is operably linked to a nuclear targeting signal upstream of the Cas coding region and a nuclear localization signal downstream of the Cas coding region.

72. A plant, plant cell, or seed produced by the method of claim 2.

73. A plant, plant cell, or seed produced by the method of claim 3.

74. A plant, plant cell, or seed produced by the method of claim 4.

75. A plant, plant cell, or seed produced by the method of claim 5.

76. A plant comprising an edited trait of interest, wherein the plant originates from a plant cell comprising an edited trait of interest produced by the method of claim 2.

77. A plant comprising an edited trait of interest, wherein the plant originates from a plant cell comprising an edited trait of interest produced by the method of claim 3.

78. A plant comprising an edited trait of interest, wherein the plant originates from a plant cell comprising an edited trait of interest produced by the method of claim 4.

79. The method of claim 2, wherein the editing T-DNA further comprises a selectable marker expression cassette, a color marker expression cassette, or a combination thereof.

80. The method of claim 3, wherein the editing T-DNA further comprises a selectable marker expression cassette, a color marker expression cassette, or a combination thereof.

81. The method of claim 4, wherein the editing T-DNA further comprises a selectable marker expression cassette, a color marker expression cassette, or a combination thereof.

82. The method of claim 2, wherein the Cas endonuclease is expressed by SEQ ID NO:1.

83. The method of claim 3, wherein the Cas endonuclease is expressed by SEQ ID NO:1.

84. The method of claim 4, wherein the Cas endonuclease is expressed by SEQ ID NO:1.

85. The plant of claim 29, wherein the plant is a monocot or a dicot.

86. The plant of claim 85, wherein the monocot is selected from the group consisting of maize, rice, sorghum, rye, barley, wheat, millet, oats, sugarcane, turfgrass, and switchgrass.

87. The plant of claim 85, wherein the dicot is selected from the group consisting of soybean, canola, alfalfa, sunflower, cotton, tobacco, peanut, potato, tobacco, Arabidopsis, and safflower.

The application's sequence listing, which the Patent Office published only in electronic form, follows.

SEQUENCE LISTING (108 sequences)

SEQ ID NO: 1 - DNA, 4293 bp, Artificial Sequence
  Nucleotide sequence of soybean codon optimized Cas9
atggacaaaaagtactccatagggctcgatatcggcacaaacagtgtggggtgggcagtcatcactgacgactacaaggtcccctccaagaagttcaaggtcctcggcaatacagaccgccactccatcaagaagaacctcatcggagcactgttgttcgactccggagaaactgccgaagcaaccagactcaagaggaccgccagaagaaggtacacaaggcgcaagaacaggatctgctacctccaggagatcttcagtaacgagatggcaaaggtcgacgactctttcttccacaggctcgaggaatccttcctcgtcgaggaggacaagaagcatgagagacaccccatcttcggaaacatcgtcgacgaggtaagtttctgcttctacctttgatatatatataataattatcattaattagtagtaatataatatttcaaatatttttttcaaaataaaagaatgtagtatatagcaattgcttttctgtagtttataagtgtgtatattttaatttataacttttctaatatatgaccaaaacatggtgatgtgcaggtcgcctaccacgagaagtacccaaccatctaccacctgaggaagaagctcgtcgacagtaccgacaaggctgacctcaggctcatctacctcgcactcgcccacatgattaagttcaggggccacttcctcatagagggagacctcaacccagacaactccgacgtcgacaaactcttcatccaactcgtgcagacctacaatcaactctttgaagagaacccaatcaacgcctccggagtggatgctaaggctatattgtccgccaggctctccaaatcaagacgcctcgaaaacctcatcgcccagctcccaggggagaagaaaaatagcctcttcgggaacctcatagccctgtcccttggactcacccctaacttcaaatcaaatttcgacctcgcagaggacgctaagcttcaactctccaaggacacctacgacgacgacctcgataacctcctcgcccaaatcggtgatcaatacgctgacctcttcctcgctgctaagaacctctccgacgccatactcctctccgacattctgagggtcaacaccgagatcacaaaggctcccttgtccgcctccatgattaaacgctacgacgaacaccaccaggacctcaccctcttgaaggcactggttagacagcagctccccgagaagtacaaggaaatcttcttcgaccaatcaaaaaacggctacgccggatacatcgacggaggagcatcccaggaagagttctacaagttcatcaaaccaattctcgaaaagatggacggaacagaggagctcttggtcaagctcaacagggaggacctcctcagaaagcagagaaccttcgacaacggcagtatcccccaccagatccaccttggagagttgcacgcaatcctcaggaggcaagaggacttctaccccttcctcaaggacaacagggagaagatcgagaagatccttacattccgcatcccctactacgtcggacctttggcaagaggaaactcccgcttcgcatggatgactcgcaagagtgaggaaaccatcaccccttggaacttcgaggaggtcgtcgataagggagcttcagcccagtccttcatcgagcgcatgaccaacttcgataaaaatctccccaatgaaaaagtcctccccaagcacagtctgctctacgagtacttcacagtctacaacgagctcaccaaggtcaagtacgtcaccgaaggcatgagaaaacccgccttcctcagtggcgagcagaagaaggcaatcgtggacttgctgttcaagaccaaccgcaaggtcacagtcaagcaattaaaagaggactacttcaagaaaatagagtgcttcgacagtgtcgagatctctggggtcgaggacaggttcaacgcatccttggggacctatcacgacctcctcaagatcattaaagacaaggacttcctcgacaacgaggagaacgaggacatactggaggacatcgtcctcaccctcactctctttgaggacagggagatgatagaggagcgcctcaaaacctacgcccacctcttcgacgacaaggtgatgaaacagctcaagaggcgcagatacaccggatggggtagactctccaggaagctgattaatggcatccgcgacaaacagtccggcaagaccatcctcgacttcctcaagagtgacggattcgccaaccgcaacttcatgcagctcatacacgacgactccctcaccttcaaggaggacatccaaaaagcccaagtctccggacagggagactcattgcacgaacacatcgccaacttggctggatctcctgctattaaaaagggcatcctccaaaccgtcaaggtggtcgacgaactcgtcaaggtcatgggtagacacaagcccgaaaatatcgtcatcgagatggcaagggagaaccagacaacccagaagggccaaaaaaactccagggagcgcatgaaacgcatcgaggagggaataaaggagctcgggtcccagatcctcaaggagcaccccgtcgaaaatactcaactccagaatgaaaagctctacctctactacctccaaaacggcagggatatgtacgtcgaccaagagctcgacattaatcgcctctccgactacgacgtcgatcacatcgtcccccagagtttcctcaaggacgactccatcgacaacaaggtcctcaccagatccgataaaaatcgcggaaagtccgacaacgtcccctctgaggaagtggttaagaagatgaaaaactactggagacagctcctcaacgcaaagctgatcacccagcgcaagttcgacaacctcacaaaggctgagagagggggactctctgagttggacaaggccggcttcatcaagagacaactcgtggaaacccgccagatcaccaagcatgtcgcacagattctcgactcccgcatgaatactaaatacgatgaaaatgacaagctcatcagggaggtcaaggtcatcaccctgaagtccaagctcgtctccgacttccgcaaggacttccagttctacaaggtccgcgagatcaacaactaccaccacgcccacgacgcatacctcaacgctgtggttggaacagcactcatcaagaagtaccccaagctcgagtccgagttcgtctacggcgactacaaggtctacgacgtcaggaagatgatcgccaagtccgagcaagagatcggaaaggccaccgcaaaatatttcttctactccaacataatgaacttcttcaaaaccgagatcaccctggctaacggagaaataaggaagaggcccctgatagaaaccaacggcgagacaggcgagattgtctgggacaaaggcagggacttcgcaaccgtcagaaaggtgctcagtatgcctcaggtcaacatagtcaaaaagaccgaagtccagactggaggattctccaaggagtccatcctccccaaaaggaactccgacaaactgatcgccaggaaaaaggactgggaccccaaaaaatatggcggcttcgactcccctactgttgcttacagtgtgctcgtcgtcgcaaaagtcgagaaggggaaatccaagaagctcaagtcagtgaaggagctcctcggcatcaccatcatggagaggtcctccttcgagaagaaccccatcgacttcctcgaggccaagggatataaggaggtcaagaaggacctcatcattaaactccccaagtactccctcttcgagctcgaaaacggacgcaagaggatgctcgcttcagctggtgaactccagaagggcaacgaactcgctttgccctctaaatacgtcaacttcctctacctcgcctcccactatgaaaagctcaagggctccccagaggacaacgagcagaagcaactcttcgtcgagcagcacaagcattacctcgacgagatcatcgagcagatctccgagttctccaagagagtcatcctcgctgacgcaaacctcgacaaggtcctcagtgcatataacaagcaccgcgacaaaccaataagggagcaggccgaaaatattatacacctgttcaccctcaccaacttgggagcaccagccgccttcaagtatttcgacaccaccatcgacagaaagcgctacacctccacaaaggaggtcctggacgccacacttatccaccagtccatcaccggcctctatgaaacacgcatcgacctctctcaattgggaggggac

SEQ ID NO: 2 - protein, 7 aa, Artificial Sequence
  Amino acid sequence of the AT-NLS nuclear localization signal
PKKKRKV

SEQ ID NO: 3 - protein, 18 aa, Artificial Sequence
  Amino acid sequence of the VirD2 nuclear localization signal
KRPRDRHDGELGGRKRAR

SEQ ID NO: 4 - DNA, 1501 bp, Artificial Sequence
  Nucleotide sequence of soybean constitutive promoter GM-EF1A2
gggtttacttattttgtgggtatctatacttttattagatttttaatcaggctcctgatttctttttatttcgattgaattcctgaacttgtattattcagtagatcgaataaattataaaaagataaaatcataaaataatattttatcctatcaatcatattaaagcaatgaatatgtaaaattaatcttatctttattttaaaaaatcatataggtttagtatttttttaaaaataaagataggattagttttactattcactgcttattacttttaaaaaaatcataaaggtttagtatttttttaaaataaatataggaatagttttactattcactgctttaatagaaaaatagtttaaaatttaagatagttttaatcccagcatttgccacgtttgaacgtgagccgaaacgatgtcgttacattatcttaacctagctgaaacgatgtcgtcataatatcgccaaatgccaactggactacgtcgaacccacaaatcccacaaagcgcgtgaaatcaaatcgctcaaaccacaaaaaagaacaacgcgtttgttacacgctcaatcccacgcgagtagagcacagtaaccttcaaataagcgaatggggcataatcagaaatccgaaataaacctaggggcattatcggaaatgaaaagtagctcactcaatataaaaatctaggaaccctagttttcgttatcactctgtgctccctcgctctatttctcagtctctgtgtttgcggctgaggattccgaacgagtgaccttcttcgtttctcgcaaaggtaacagcctctgctcttgtctcttcgattcgatctatgcctgtctcttatttacgatgatgtttcttcggttatgtttttttatttatgctttatgctgttgatgttcggttgtttgtttcgctttgtttttgtggttcagttttttaggattcttttggtttttgaatcgattaatcggaagagattttcgagttatttggtgtgttggaggtgaatcttttttttgaggtcatagatctgttgtatttgtgttataaacatgcgactttgtatgattttttacgaggttatgatgttctggttgttttattatgaatctgttgagacagaaccatgatttttgttgatgttcgtttacactattaaaggtttgttttaacaggattaaaagttttttaagcatgttgaaggagtcttgtagatatgtaaccgtcgatagtttttttgtgggtttgttcacatgttatcaagcttaatcttttactatgtatgcgaccatatctggatccagcaaaggcgattttttaattccttgtgaaacttttgtaatatgaagttgaaattttgttattggtaaactataaatgtgtgaagttggagtatacctttaccttcttatttggctttgtgatagtttaatttatatgtattttgagttctgacttgtatttctttgaattgattctagtttaagtaatc

SEQ ID NO: 5 - DNA, 439 bp, Artificial Sequence
  Nucleotide sequence of soybean GM-U6-13.1 promoter
ccgggtgtgatttagtataaagtgaagtaatggtcaaaagaaaaagtgtaaaacgaagtacctagtaataagtaatattgaacaaaataaatggtaaagtgtcagatatataaaataggctttaataaaaggaagaaaaaaaacaaacaaaaaataggttgcaatggggcagagcagagtcatcatgaagctagaaaggctaccgatagataaactatagttaattaaatacattaaaaaatacttggatctttctcttaccctgtttatattgagacctgaaacttgagagagatacactaatcttgccttgttgtttcattccctaacttacaggactcagcgcatgtcatgtggtctcgttccccatttaagtcccacaccgtctaaacttattaaattattaatgtttataactagatgcacaacaacaaagctt

SEQ ID NO: 6 - DNA, 471 bp, Artificial Sequence
  Nucleotide sequence of soybean GM-U6-9.1 promoter
ccgggttaagagaattgtaagtgtgcttttatatatttaaaattaatatattttgaaatgttaaaatataaaagaaaattcaatgtaaattaaaaataaataaatgtttaataaagataaattttaaaacataaaagaaaatgtctaacaagaggattaagatcctgtgctcttaaatttttaggtgttgaaatcttagccatacaaaatatattttattaaaaccaagcatgaaaaaagtcactaaagagctatataactcatgcagctagaaatgaagtgaagggaatccagtttgttctcagtcgaaagagtgtctatctttgttcttttctgcaaccgagttaagcaaaatgggaatgcgaggtatcttcctttcgttaggggagcaccagatgcatagttagtcccacattgatgaatataacaagagcttcacagaatatatagcccaggccacagtaaaagctt

SEQ ID NO: 7 - DNA, 20 bp, Artificial Sequence
  Nucleotide sequence of GM-FAD2-1 CR1
gtgtttggaacccttgagag

SEQ ID NO: 8 - DNA, 20 bp, Artificial Sequence
  Nucleotide sequence of GM-FAD3-CR2
gcataactgagggatctcca

SEQ ID NO: 9 - DNA, 24690 bp, Artificial Sequence
  Nucleotide sequence of RV019927 construct
cttctacaaaactcacagaaacaatcaaacaaacatacacagcgatttattcacacgaacccgaattacaacggtatatatcctgtcagccaacaccaaaacatcaaaaaaatcgggatcaggatcaggatctgcggccgcatcctgcaggagctcaaacgagcaggaagcaacgagagggtggcgcgcgaccgacgtgcgtacgtagcatgagcctgagtggagacgttggacgtgtatgtatatacctctctgcgtgttaactatgtacgtaagcggcaggcagtgcaataagtgtggctctgtagtatgtacgtgcgggtacgatgctgtaagctactgaggcaagtccataaataaataatgacacgtgcgtgttctataatctcttcgcttcttcatttgtccccttgcggagtttggcatccattgatgccgttacgctgagaacagacacagcagacgaaccaaaagtgagttcttgtatgaaactatgacccttcatcgctaggctcaaacagcaccccgtacgaacacagcaaattagtcatctaactattagcccctacatgtttcagacgatacataaatatagcccatccttagcaattagctattggccctgcccatcccaagcaatgatctcgaagtatttttaatatatagtatttttaatatgtagcttttaaaattagaagataattttgagacaaaaatctccaagtatttttttgggtattttttactgcctccgtttttctttatttctcgtcacctagtttaattttgtgctaatcggctataaacgaaacagagagaaaagttactctaaaagcaactccaacagattagatataaatcttatatcctgcctagagctgttaaaaagatagacaactttagtggattagtgtatgcaacaaactctccaaatttaagtatcccaactacccaacgcatatcgttcccttttcattggcgcacgaactttcacctgctatagccgacgtacatgttcgttttttttgggcggcgcttactttcttccccgttcgttctcagcatcgcaactcaatttgttatggcggagaagcccttgtatcccaggtagtaatgcacagatatgcattattattattcataaaacgaacgctcttcaactggaagagcggttactaccggttcactagctagctgctaatcgagctagttaccctatgaggtgacatgaagcgctcacggttactatgacggttagcttcacgactgttggtggcagtagcgtacgacttagctatagttccggacttacctagctaggttaccagagctggtcaccttcttcatcgctaagaagacactcagtagtccggaccgatatcgctatcaactttgtatagaaaagttgggccagaatggcccggaccgggttaccaagcggccgcgccgggtgtgatttagtataaagtgaagtaatggtcaaaagaaaaagtgtaaaacgaagtacctagtaataagtaatattgaacaaaataaatggtaaagtgtcagatatataaaataggctttaataaaaggaagaaaaaaaacaaacaaaaaataggttgcaatggggcagagcagagtcatcatgaagctagaaaggctaccgatagataaactatagttaattaaatacattaaaaaatacttggatctttctcttaccctgtttatattgagacctgaaacttgagagagatacactaatcttgccttgttgtttcattccctaacttacaggactcagcgcatgtcatgtggtctcgttccccatttaagtcccacaccgtctaaacttattaaattattaatgtttataactagatgcacaacaacaaagcttgtgtttggaacccttgagaggttttagagctagaaatagcaagttaaaataaggctagtccgttatcaacttgaaaaagtggcaccgagtcggtgcttttttttgcggccgcttgtaacccggtccgggccattctggccgatccgttggggtcggaggagactagccgttagttagtgcagaccgtctctaatcagtgactagcgacgtcccgacccacccagctttcttgtacaaagtggggatcggccagaatggcccggaccgggttaccaagcggccgcaattggatcgggtttacttattttgtgggtatctatacttttattagatttttaatcaggctcctgatttctttttatttcgattgaattcctgaacttgtattattcagtagatcgaataaattataaaaagataaaatcataaaataatattttatcctatcaatcatattaaagcaatgaatatgtaaaattaatcttatctttattttaaaaaatcatataggtttagtatttttttaaaaataaagataggattagttttactattcactgcttattacttttaaaaaaatcataaaggtttagtatttttttaaaataaatataggaatagttttactattcactgctttaatagaaaaatagtttaaaatttaagatagttttaatcccagcatttgccacgtttgaacgtgagccgaaacgatgtcgttacattatcttaacctagctgaaacgatgtcgtcataatatcgccaaatgccaactggactacgtcgaacccacaaatcccacaaagcgcgtgaaatcaaatcgctcaaaccacaaaaaagaacaacgcgtttgttacacgctcaatcccacgcgagtagagcacagtaaccttcaaataagcgaatggggcataatcagaaatccgaaataaacctaggggcattatcggaaatgaaaagtagctcactcaatataaaaatctaggaaccctagttttcgttatcactctgtgctccctcgctctatttctcagtctctgtgtttgcggctgaggattccgaacgagtgaccttcttcgtttctcgcaaaggtaacagcctctgctcttgtctcttcgattcgatctatgcctgtctcttatttacgatgatgtttcttcggttatgtttttttatttatgctttatgctgttgatgttcggttgtttgtttcgctttgtttttgtggttcagttttttaggattcttttggtttttgaatcgattaatcggaagagattttcgagttatttggtgtgttggaggtgaatcttttttttgaggtcatagatctgttgtatttgtgttataaacatgcgactttgtatgattttttacgaggttatgatgttctggttgttttattatgaatctgttgagacagaaccatgatttttgttgatgttcgtttacactattaaaggtttgttttaacaggattaaaagttttttaagcatgttgaaggagtcttgtagatatgtaaccgtcgatagtttttttgtgggtttgttcacatgttatcaagcttaatcttttactatgtatgcgaccatatctggatccagcaaaggcgattttttaattccttgtgaaacttttgtaatatgaagttgaaattttgttattggtaaactataaatgtgtgaagttggagtatacctttaccttcttatttggctttgtgatagtttaatttatatgtattttgagttctgacttgtatttctttgaattgattctagtttaagtaatccatggcacctaaaaagaagaggaaagttatggacaaaaagtactccatagggctcgatatcggcacaaacagtgtggggtgggcagtcatcactgacgactacaaggtcccctccaagaagttcaaggtcctcggcaatacagaccgccactccatcaagaagaacctcatcggagcactgttgttcgactccggagaaactgccgaagcaaccagactcaagaggaccgccagaagaaggtacacaaggcgcaagaacaggatctgctacctccaggagatcttcagtaacgagatggcaaaggtcgacgactctttcttccacaggctcgaggaatccttcctcgtcgaggaggacaagaagcatgagagacaccccatcttcggaaacatcgtcgacgaggtaagtttctgcttctacctttgatatatatataataattatcattaattagtagtaatataatatttcaaatatttttttcaaaataaaagaatgtagtatatagcaattgcttttctgtagtttataagtgtgtatattttaatttataacttttctaatatatgaccaaaacatggtgatgtgcaggtcgcctaccacgagaagtacccaaccatctaccacctgaggaagaagctcgtcgacagtaccgacaaggctgacctcaggctcatctacctcgcactcgcccacatgattaagttcaggggccacttcctcatagagggagacctcaacccagacaactccgacgtcgacaaactcttcatccaactcgtgcagacctacaatcaactctttgaagagaacccaatcaacgcctccggagtggatgctaaggctatattgtccgccaggctctccaaatcaagacgcctcgaaaacctcatcgcccagctcccaggggagaagaaaaatagcctcttcgggaacctcatagccctgtcccttggactcacccctaacttcaaatcaaatttcgacctcgcagaggacgctaagcttcaactctccaaggacacctacgacgacgacctcgataacctcctcgcccaaatcggtgatcaatacgctgacctcttcctcgctgctaagaacctctccgacgccatactcctctccgacattctgagggtcaacaccgagatcacaaaggctcccttgtccgcctccatgattaaacgctacgacgaacaccaccaggacctcaccctcttgaaggcactggttagacagcagctccccgagaagtacaaggaaatcttcttcgaccaatcaaaaaacggctacgccggatacatcgacggaggagcatcccaggaagagttctacaagttcatcaaaccaattctcgaaaagatggacggaacagaggagctcttggtcaagctcaacagggaggacctcctcagaaagcagagaaccttcgacaacggcagtatcccccaccagatccaccttggagagttgcacgcaatcctcaggaggcaagaggacttctaccccttcctcaaggacaacagggagaagatcgagaagatccttacattccgcatcccctactacgtcggacctttggcaagaggaaactcccgcttcgcatggatgactcgcaagagtgaggaaaccatcaccccttggaacttcgaggaggtcgtcgataagggagcttcagcccagtccttcatcgagcgcatgaccaacttcgataaaaatctccccaatgaaaaagtcctccccaagcacagtctgctctacgagtacttcacagtctacaacgagctcaccaaggtcaagtacgtcaccgaaggcatgagaaaacccgccttcctcagtggcgagcagaagaaggcaatcgtggacttgctgttcaagaccaaccgcaaggtcacagtcaagcaattaaaagaggactacttcaagaaaatagagtgcttcgacagtgtcgagatctctggggtcgaggacaggttcaacgcatccttggggacctatcacgacctcctcaagatcattaaagacaaggacttcctcgacaacgaggagaacgaggacatactggaggacatcgtcctcaccctcactctctttgaggacagggagatgatagaggagcgcctcaaaacctacgcccacctcttcgacgacaaggtgatgaaacagctcaagaggcgcagatacaccggatggggtagactctccaggaagctgattaatggcatccgcgacaaacagtccggcaagaccatcctcgacttcctcaagagtgacggattcgccaaccgcaacttcatgcagctcatacacgacgactccctcaccttcaaggaggacatccaaaaagcccaagtctccggacagggagactcattgcacgaacacatcgccaacttggctggatctcctgctattaaaaagggcatcctccaaaccgtcaaggtggtcgacgaactcgtcaaggtcatgggtagacacaagcccgaaaatatcgtcatcgagatggcaagggagaaccagacaacccagaagggccaaaaaaactccagggagcgcatgaaacgcatcgaggagggaataaaggagctcgggtcccagatcctcaaggagcaccccgtcgaaaatactcaactccagaatgaaaagctctacctctactacctccaaaacggcagggatatgtacgtcgaccaagagctcgacattaatcgcctctccgactacgacgtcgatcacatcgtcccccagagtttcctcaaggacgactccatcgacaacaaggtcctcaccagatccgataaaaatcgcggaaagtccgacaacgtcccctctgaggaagtggttaagaagatgaaaaactactggagacagctcctcaacgcaaagctgatcacccagcgcaagttcgacaacctcacaaaggctgagagagggggactctctgagttggacaaggccggcttcatcaagagacaactcgtggaaacccgccagatcaccaagcatgtcgcacagattctcgactcccgcatgaatactaaatacgatgaaaatgacaagctcatcagggaggtcaaggtcatcaccctgaagtccaagctcgtctccgacttccgcaaggacttccagttctacaaggtccgcgagatcaacaactaccaccacgcccacgacgcatacctcaacgctgtggttggaacagcactcatcaagaagtaccccaagctcgagtccgagttcgtctacggcgactacaaggtctacgacgtcaggaagatgatcgccaagtccgagcaagagatcggaaaggccaccgcaaaatatttcttctactccaacataatgaacttcttcaaaaccgagatcaccctggctaacggagaaataaggaagaggcccctgatagaaaccaacggcgagacaggcgagattgtctgggacaaaggcagggacttcgcaaccgtcagaaaggtgctcagtatgcctcaggtcaacatagtcaaaaagaccgaagtccagactggaggattctccaaggagtccatcctccccaaaaggaactccgacaaactgatcgccaggaaaaaggactgggaccccaaaaaatatggcggcttcgactcccctactgttgcttacagtgtgctcgtcgtcgcaaaagtcgagaaggggaaatccaagaagctcaagtcagtgaaggagctcctcggcatcaccatcatggagaggtcctccttcgagaagaaccccatcgacttcctcgaggccaagggatataaggaggtcaagaaggacctcatcattaaactccccaagtactccctcttcgagctcgaaaacggacgcaagaggatgctcgcttcagctggtgaactccagaagggcaacgaactcgctttgccctctaaatacgtcaacttcctctacctcgcctcccactatgaaaagctcaagggctccccagaggacaacgagcagaagcaactcttcgtcgagcagcacaagcattacctcgacgagatcatcgagcagatctccgagttctccaagagagtcatcctcgctgacgcaaacctcgacaaggtcctcagtgcatataacaagcaccgcgacaaaccaataagggagcaggccgaaaatattatacacctgttcaccctcaccaacttgggagcaccagccgccttcaagtatttcgacaccaccatcgacagaaagcgctacacctccacaaaggaggtcctggacgccacacttatccaccagtccatcaccggcctctatgaaacacgcatcgacctctctcaattgggaggggacaagagaccaagagacagacacgatggagagcttggaggtagaaagagagcaaggtagttcgaactggccaggtaccgttaacctagacttgtccatcttctggattggccaacttaattaatgtatgaaataaaaggatgcacacatagtgacatgctaatcactataatgtgggcatcaaagttgtgtgttatgtgtaattactagttatctgaataaaagagaaagagatcatccatatttcttatcctaaatgaatgtcacgtgtctttataattctttgatgaaccagatgcatttcattaaccaaatccatatacatataaatattaatcatatataattaatatcaattgggttagcaaaacaaatctagtctaggtgtgttttgcaagcttggcgcgccgttaacttaacggcaaacgctaattagtcactaggcccaggaaacactaactaagccctagcttatcctagcgcaacctagttaggtcttggtaacccggtccgggccattctggccgatcccgggcaactttattatacaaagttgatagatatcggtccgacggccagaatggccatctggattcagcaggcctagaaggccatttagtcctagcgatatcaggatattcttgtttaagatgttgaactctatggaggtttgtatgaactgatgatctaggaccggataagttcccttcttcatagcgaacttattcaaagaatgttttgtgtatcattcttgttacattgttattaatgaaaaaatattattggtcattggactgaacacgagtgttaaatatggaccaggccccaaataagatccattgatatatgaattaaataacaagaataaatcgagtcaccaaaccacttgccttttttaacgagacttgttcaccaacttgatacaaaagtcattatcctatgcaaatcaataatcatacaaaaatatccaataacactaaaaaattaaaagaaatggataatttcacaatatgttatacgataaagaagttacttttccaagaaattcactgattttataagcccacttgcattagataaatggcaaaaaaaaacaaaaaggaaaagaaataaagcacgaagaattctagaaaatacgaaatacgcttcaatgcagtgggacccacggttcaattattgccaattttcagctccaccgtatatttaaaaaataaaacgataatgctaaaaaaatataaatcgtaacgatcgttaaatctcaacggctggatcttatgacgaccgttagaaattgtggttgtcgacgagtcagtaataaacggcgtcaaagtggttgcagccggcacacacgagtcgtgtttatcaactcaaagcacaaatacttttcctcaacctaaaaataaggcaattagccaaaaacaactttgcgtgtaaacaacgctcaatacacgtgtcattttattattagctattgcttcaccgccttagctttctcgtgacctagtcgtcctcgtcttttcttcttcttcttctataaaacaatacccaaagagctcttcttcttcacaattcagatttcaatttctcaaaatcttaaaaactttctctcaattctctctaccgtgatcaaggtaaatttctgtgttccttattctctcaaaatcttcgattttgttttcgttcgatcccaatttcgtatatgttctttggtttagattctgttaatcttagatcgaagacgattttctgggtttgatcgttagatatcatcttaattctcgattagggtttcatagatatcatccgatttgttcaaataatttgagttttgtcgaataattactcttcgatttgtgatttctatctagatctggtgttagtttctagtttgtgcgatcgaatttgtcgattaatctgagtttttctgattaacagccatggctgcaactactcttacatctgctttacctggtgctttcagttcatcccagagaccaagtgctcctttcaacttacaaagatcacctagagtgcttagaaggttcaacagaaagacaggacgtcaacctcgtggacttgttcgtgctgcaaaggctcaagcggcgcaaaacctgccagagaaattcgatgaaacaagactctgggaggccctcaggggatttggggttagtccaagtagggttacttacgctcccgtcggattcggagattaccactggaccgtcacagatgaagacgggagaccttggttcgcaactgtcagtgacctcgaacacaaagagcattgcgggcagggagcacaagcagcccttaaaggactcagacaagctatggacactgccctcgcacttagagatagggacggactcagattcgtggttgctccagtggcagcaacagatgggggtggccctgtccttccccttgacgctaggtatgcactcacagtcttccctcacgtcccaggaagaacaggagagttcggacaaagactcacagaggcagagagggacagactgcttgctcttctggcagaactccacggaagaacacctcctgaaacaaccccaccagccgatatggaaccaccaggacttcctggtgttagagcagcactcgccgaaagtgaaggaccttggagtggaggaccatttgcagaacccgctagacttcttctcagagaacacgaggccacactgcacgcaagactcgctgaattcgaagccctcgtcgcaagagttaagggtcgtggagcacctcttgtcgttacccacggagaaccacacccaggcaacttgatcctcggagaggaaggctatctcctcgtggactgggatacagttggactggctccagctgaaagggatttgagtctcatctcagacgacccagctgacctcgcaagatacgcagagcttacaggaagaactccagacccagacgcactcgcactctatagactgcgttggagtctccttgatgtggctgagttcgtcgagtggttcagggctgaacaccaaagaacccaagacaccgagagtgcatggaaggggttcactgacacacttgggcaattggctgctggtggatcagctgcatagcctaggaaacttatctctgttatgaatcagaagaagttcatgtctcgtttcatttaaaactttggtggtttgtgttttggggccttgtaaagcccctgatgaataattgttcaactatgtttccgttcctgtgttatacctttctttctaatgagtaatgacatcaaacttcttctgtattgaaattatgtccttgtgagtctctttatcatcgtttcgtctttacattatatgtgctacttttgtctaatgagcctgaaaagtggctccaatggtacgcactggaagatttgttggcttctggtagatatagcgacagtgttgagcttgtaatatcatgtctcttattgctaaattagttcctttcttaacagaaaccttcaaagtttttgtttttgttttcatttacctaatgtacacatacgctggccatgactaacaacatgtccaggcttagagcatatttttttctagcttaaattgttaacttgtcattcagtaaaatccgagaattgtgaagctctaattgaagctaattcgttttataaagtcagttaaaaagtatactaaattatccaacttttcttcaaaatctcaaaattctatgacaaaacgatagtctttgtttatgtcagtaccacaaagaggtggaaaaaaacaccaaaaaaacaataagcaaactatacactgagaagaaaaataaaagagagctcaatagatgttttatactaacggtagattagatcaaagatccaagctttactctacatagagcagaacccagaatcccttcatatctcttttattctagcaccgataatctactgaaaagaagacacttagagctctgtctctttgtcaaagaagtcccagccgtcatccagaagctccttacgttcattaacagagggtgattgcggttacatcatgtacggaaaaataattctaatccttgatttaaatttgaacttgactatttatttattctttatttcattttgtaaatcattttatgtatctcctggcaagcaattttatccaccttgcaccaacaccttcgggttccataatcaaaccaccttaacttcacaccatgctgtaactcacaccgcccagcatctccaatgtgaaagaagctaaaatttaataaacaatcatacgaagcagtgacaaaataccagatggtattaatgcttcgataaaattaattggaaagtataaaatggtagaaaataataaattataattaatttaagtaagataaaaaataattaaaaactaaaatgttaaaattttaaaaaaattattttaaataatatttaaaaacattaaaaatcattttaaaaaatttatttatagaacaattaaataaatatttcagctaataaaaaacaaaagcttacctagccttagaagacaacttgtccaacaattagatgatacccattgcccttacgttttctttaacatcaattattgtttttgtcaacaagctatcttttagttttattttattggtaaaaaatatgtcgccttcaagttgcatcatttaacacatctcgtcattagaaaaataaaactcttccctaaacgattagtagaaaaaatcattcgataataaataagaaagaaaaattagaaaaaaataacttcattttaaaaaaatcattaaggctatattttttaaatgactaattttatatagactgtaactaaaagtatacaatttattatgctatgtatcttaaagaattacttataaaaatctacggaagaatatcttacaaagtgaaaaacaaatgagaaagaatttagtgggatgattatgattttatttgaaaattgaaaaaataattattaaagactttagtggagtaagaaagctttcctattagtcttttcttatccataaaaaaaaaaaaaaaaatctagcgtgacagcttttccatagattttaataatgtaaaatactggtagcagccgaccgttcaggtaatggacactgtggtcctaacttgcaacgggtgcgggcccaatttaataacgccgtggtaacggataaagccaagcgtgaagcggtgaaggtacatctctgactccgtcaagattacgaaaccgtcaactacgaaggactccccgaaatatcatctgtgtcataaacaccaagtcacaccatacatgggcacgcgtcacaatatgattggagaacggttccaccgcatatgctataaaatgcccccacacccctcgaccctaatcgcacttcaattgcaatcaaattagttcattctctttgcgcagttccctacctctcctttcaaggttcgtagatttcttccgtttttttttcttcttctttattgtttgttctacatcagcatgatgttgatttgattgtgttttctatcgtttcatcgattataaattttcataatcagaagattcagcttttattaatgcaagaacgtccttaattgatgattttataaccgtaaattaggtctaattagagtttttttcataaagattttcagatccgtttacaacaagccttaattgttgattctgtagtcgtagattaaggtttttttcatgaactacttcagatccgttaaacaacagccttatttgttgatacttcagtcgtttttcaagaaattgttcagatccgttgataaaagccttattcgttgattctgtatggtatttcaagagatattgctcaggtcctttagcaactaccttatttgttgattctgtggccatagattaggattttttttcacgaaattgcttcttgaaattacgtgatggattttgattctgatttatcttgtgattgttgactctacagatggcctcctccgagaacgtcatcaccgagttcatgcgcttcaaggtgcgcatggagggcaccgtgaacggccacgagttcgagatcgagggcgagggcgagggccgcccctacgagggccacaacaccgtgaagctgaaggtgacgaagggcggccccctgcccttcgcctgggacatcctgtccccccagttccagtacggctccaaggtgtacgtgaagcaccccgccgacatccccgactacaagaagctgtccttccccgagggcttcaagtgggagcgcgtgatgaacttcgaggacggcggcgtggcgaccgtgacccaggactcctccctgcaggacggctgcttcatctacaaggtgaagttcatcggcgtgaacttcccctccgacggccccgtgatgcagaagaagaccatgggctgggaggcctccaccgagcgcctgtacccccgcgacggcgtgctgaagggcgagacccacaaggccctgaagctgaaggacggcggccactacctggtggagttcaagtccatctacatggccaagaagcccgtgcagctgcccggctactactacgtggacgccaagctggacatcacctcccacaacgaggactacaccatcgtggagcagtacgagcgcaccgagggccgccaccacctgttcctgtagttttgtgatctgatgataagtggttggttcgtgtctcatgcacttgggaggtgatctatttcacctggtgtagtttgtgtttccgtcagttggaaaaacttatccctatcgatttcgttttcattttctgcttttcttttatgtaccttcgtttgggcttgtaacgggcctttgtatttcaactctcaataataatccaagtgcatgttaaacaatttgtcatctgtttcggctttgatatactactggtgaagatgggccgtactactgcatcacaacgaaaaataataataagatgaaaaacttgaagtggaaaaaaaaaaaacttgaatgttcactactactcattgaccataatgtttaacatacatagctcaatagtatttttgtgaatatggcaacacaaacagtccaaaacaattgtctcttactataccaaaccaagggcgccgcttgtttgccactctttgtgtgcaatagtgtgattaccacatctccacattcaatatattccctgaattatctgacgattttgatggctcactgttttcccaagtcttgaattgtcttctgtgcgccagtcaaatgcatatgtgttgagtttatcttttaaatatcaagcttttgtttttaacttttgtttgtaaccaaaaactcacagtaggagtttgatcacataattttatgtttgcctttgcaatttctagtgagtctttgattaaaagcttgaaaagaaaatgcagccaagcttaccaagtaagttatgtgtattaaccagaggaagagagaatcttgcaaaatttcaacaaacacaaaaagaagtattactacgattggtggagaaagaaaacgattccaaatcttgaactgttgttgtaaaagcatagcagaaagtgggagacaaccgaaatagaaatgactataacttaatttaatgttatcattataatttcttctagcaaatatttagaaagtaaatatcacatcaacctttaatgtaattaagctttctctttttgattcatgtgagatgaaaagaaaaaaaagaagagaaaagtgtagaaaacacatcatttctaagctgaagccacttacgcttgattccgatgacttcgtaggttcctagctcaagccgctcgtgtccaagcgtcacttacgattagctaatgattacggcatctaggaccgactagttcttatgtgcttctagtctccaaatgtggttgatagttattttgctctaagatcaacagtaatgaagtataaatcatcgttgtggtgtgctactcggttaattgagcattaacacacacaaacatgacgaggatggtataatctccaaaaatgtgtactttgttaggtgggaccctatagccttgattaatgtgctatgttaggcatgcctggaaacgtgtgacgcatatgttttgtgaacctgttgatattatatgtgcttttatattaccatattttattaaaatactaatatttattactagtaagatataacattctatctagcttaaaaactaaccataaatattccataataactagatttaccaaactaatatactaaatatacataataaatacaaaattaacaagacaataatcaatatttatgagcttaatatatttagacattatggttggtcgacgataatcatgctaacttttcgtaattgcttgattgaaatatgcttagaataatgcctctttgttctacatggcaaatagggaccattatggtgtaacaccctgggaaccacaaacaccccgaaatgctactaaactacacaactaaccttcatatataaaatttcgacagcatctcctttgaaaatttgcatagacgtggaagcaacagagtataaacagatctagctagctaagtttaaacggccggccaaacgtgcaagcgctactagacaattcagtacattaaaaacgtccgcaatgtgttattaagttgtctaagcgtcaatttatttacaattgaatatatcctgccaccagccagccaacagctccccgaccggcagctcggcacaaaatcaccactcgatacaggcagcccatcagtccgggacggcgtcagcgggagagccgttgtaaggcggcagactttgctcatgttaccgatgctattcggaagaacggcaactaagctgccgggtttgaaacacggatgatctcgcggagggtagcatgttgattgtaacgatgacagagcgttgctgcctgtgatcaaatatcatctccctcgcagagatccgaattatcagccttcttattcatttctcgcttaaccgtgacaggcgcgcgcggtgccacctgggtccttttcatcacgtgctataaaaataattataatttaaattttttaatataaatatataaattaaaaatagaaagtaaaaaaagaaattaaagaaaaaatagtttttgttttccgaagatgtaaaagactctagggggatcgccaacaaatactaccttttatcttgctcttcctgctctcaggtattaatgccgaattgtttcatcttgtctgtgtagaagaccacacacgaaaatcctgtgattttacattttacttatcgttaatcgaatgtatatctatttaatctgcttttcttgtctaataaatatatatgtaaagtacgctttttgttgaaattttttaaacctttgtttatttttttttcttcattccgtaactcttctaccttctttatttactttctaaaatccaaatacaaaacataaaaataaataaacacagagtaaattcccaaattattccatcattaaaagatacgaggcgcgtgtaagttacaggcaagcgatccgtcctaagaaaccattattatcatgacattaacctataaaaataggcgtatcacgaggccctttcgtctcgcgcgtttcggtgatgacggtgaaaacctctgacacatgcagctcccggagacggtcacagcttgtctgtaagcggatgccgggagcagacaagcccgtcagggcgcgtcagcgggtgttggcgggtgtcggggctggcttaactatgcggcatcagagcagattgtactgagagtgcaccataccacagcttttcaattcaattcatcattttttttttattcttttttttgatttcggtttctttgaaatttttttgattcggtaatctccgaacagaaggaagaacgaaggaaggagcacagacttagattggtatatatacgcatatgtagtgttgaagaaacatgaaattgcccagtattcttaacccaactgcacagaacaaaaacctgcaggaaacgaagataaatcatgtcgaaagctacatataaggaacgtgctgctactcatcctagtcctgttgctgccaagctatttaatatcatgcacgaaaagcaaacaaacttgtgtgcttcattggatgttcgtaccaccaaggaattactggagttagttgaagcattaggtcccaaaatttgtttactaaaaacacatgtggatatcttgactgatttttccatggagggcacagttaagccgctaaaggcattatccgccaagtacaattttttactcttcgaagacagaaaatttgctgacattggtaatacagtcaaattgcagtactctgcgggtgtatacagaatagcagaatgggcagacattacgaatgcacacggtgtggtgggcccaggtattgttagcggtttgaagcaggcggcagaagaagtaacaaaggaacctagaggccttttgatgttagcagaattgtcatgcaagggctccctatctactggagaatatactaagggtactgttgacattgcgaagagcgacaaagattttgttatcggctttattgctcaaagagacatgggtggaagagatgaaggttacgattggttgattatgacacccggtgtgggtttagatgacaagggagacgcattgggtcaacagtatagaaccgtggatgatgtggtctctacaggatctgacattattattgttggaagaggactatttgcaaagggaagggatgctaaggtagagggtgaacgttacagaaaagcaggctgggaagcatatttgagaagatgcggccagcaaaactaaaaaactgtattataagtaaacgcgcgcgggcgcgcctaaaacagcttgcgtcatgcggtcgctgcgtatatgatgcgatgagtaaataaacaaatacgcaaggggaacgcatgaaggttatcgctgtacttaaccagaaaggcgggtcaggcaagacgaccatcgcaacccatctagcccgcgccctgcaactcgccggggccgatgttctgttagtcgattccgatccccagggcagtgcccgcgattgggcggccgtgcgggaagatcaaccgctaaccgttgtcggcatcgaccgcccgacgattgaccgcgacgtgaaggccatcggccggcgcgacttcgtagtgatcgacggagcgccccaggcggcggacttggctgtgtccgcgatcaaggcagccgacttcgtgctgattccggtgcagccaagcccttacgacatatgggccaccgccgacctggtggagctggttaagcagcgcattgaggtcacggatggaaggctacaagcggcctttgtcgtgtcgcgggcgatcaaaggcacgcgcatcggcggtgaggttgccgaggcgctggccgggtacgagctgcccattcttgagtcccgtatcacgcagcgcgtgagctacccaggcactgccgccgccggcacaaccgttcttgaatcagaacccgagggcgacgctgcccgcgaggtccaggcgctggccgctgaaattaaatcaaaactcatttgagttaatgaggtaaagagaaaatgagcaaaagcacaaacacgctaagtgccggccgtccgagcgcacgcagcagcaaggctgcaacgttggccagcctcgcagacacgccagccatgaagcgggtcaactttcagttgccggcggaggatcacaccaagctgaagatgtacgcggtacgccaaggcaagaccattaccgagctgctatctgaatacatcgcgcagctaccagagtaaatgagcaaatgaataaatgagtagatgaattttagcggctaaaggaggcggcatggaaaatcaagaacaaccaggcaccgacgccgtggaatgccccatgtgtggaggaacgggcggttggccaggcgtaagcggctgggttgcctgccggccctgcaatggcactggaacccccaagcccgaggaatcggcgtgagcggtcgcaaaccatccggcccggtacaaatcggcgcggcgctgggtgatgacctggtggagaagttgaaggcagcgcaggccgcccagcggcaacgcatcgaggcagaagcacgccccggtgaatcgtggcaagcagccgctgatcgaatccgcaaagaatcccggcaaccgccggcagccggtgcgccgtcgattaggaagccgcccaagggcgacgagcaaccagattttttcgttccgatgctctatgacgtgggcacccgcgatagtcgcagcatcatggacgtggccgttttccgtctgtcgaagcgtgaccgacgagctggcgaggtgatccgctacgagcttccagacgggcacgtagaggtttccgcagggccggcaggcatggccagtgtgtgggattacgacctggtactgatggcggtttcccatctaaccgaatccatgaaccgataccgggaagggaagggagacaagcccggccgcgtgttccgtccacacgttgcggacgtactcaagttctgccggcgagccgatggcggaaagcagaaagacgacctggtagaaacctgcattcggttaaacaccacgcacgttgccatgcagcgtacgaagaaggccaagaacggccgcctggtgacggtatccgagggtgaagccttgattagccgctacaagatcgtaaagagcgaaaccgggcggccggagtacatcgagatcgagctagctgattggatgtaccgcgagatcacagaaggcaagaacccggacgtgctgacggttcaccccgattactttttgatcgatcccggcatcggccgttttctctaccgcctggcacgccgcgccgcaggcaaggcagaagccagatggttgttcaagacgatctacgaacgcagtggcagcgccggagagttcaagaagttctgtttcaccgtgcgcaagctgatcgggtcaaatgacctgccggagtacgatttgaaggaggaggcggggcaggctggcccgatcctagtcatgcgctaccgcaacctgatcgagggcgaagcatccgccggttcctaatgtacggagcagatgctagggcaaattgccctagcaggggaaaaaggtcgaaaaggtctctttcctgtggatagcacgtacattgggaacccaaagccgtacattgggaaccggaacccgtacattgggaacccaaagccgtacattgggaaccggtcacacatgtaagtgactgatataaaagagaaaaaaggcgatttttccgcctaaaactctttaaaacttattaaaactcttaaaacccgcctggcctgtgcataactgtctggccagcgcacagccgaagagctgcaaaaagcgcctacccttcggtcgctgcgctccctacgccccgccgcttcgcgtcggcctatggcgcgccggaaaatatgcatggcatgcccgttccatacagaagctgggcgaacaaacgatgctcgccttccagaaaaccgaggatgcgaaccacttcatccggggtcagcaccaccggcaagcgccgcgacggccgaggtcttccgatctcctgaagccagggcagatccgtgcacagcaccttgccgtagaagaacagcaaggccgccaatgcctgacgatgcgtggagaccgaaaccttgcgctcgttcgccagccaggacagaaatgcctcgacttcgctgctgcccaaggttgccgggtgacgcacaccgtggaaacggatgaaggcacgaacccagtggacataagcctgttcggttcgtaagctgtaatgcaagtagcgtatgcgctcacgcaactggtccagaaccttgaccgaacgcagcggtggtaacggcgcagtggcggttttcatggcttgttatgactgtttttttggggtacagtctatgcctcgggcatccaagcagcaagcgcgttacgccgtgggtcgatgtttgatgttatggagcagcaacgatgttacgcagcagggcagtcgccctaaaacaaagttaaacatcatgagggaagcggtgatcgccgaagtatcgactcaactatcagaggtagttggcgtcatcgagcgccatctcgaaccgacgttgctggccgtacatttgtacggctccgcagtggatggcggcctgaagccacacagtgatattgatttgctggttacggtgacggtaaggcttgatgaaacaacgcggcgagctttgatcaacgaccttttggaaacttcggcttcccctggagagagcgagattctccgcgctgtagaagtcaccattgttgtgcacgacgacatcattccgtggcgttatccagctaagcgcgaactgcaatttggagaatggcagcgcaatgacattcttgcaggtatcttcgagccagccacgatcgacattgatctggctatcttgctgacaaaagcaagagaacatagcgttgccttggtaggtccagcggcggaggaactctttgatccggttcctgaacaggatctatttgaggcgctaaatgaaaccttaacgctatggaactcgccgcccgactgggctggcgatgagcgaaatgtagtgcttacgttgtcccgcatttggtacagcgcagtaaccggcaaaatcgcgccgaaggatgtcgctgccgactgggcaatggagcgcctgccggcccagtatcagcccgtcatacttgaagctagacaggcttatcttggacaagaagaagatcgcttggcctcgcgcgcagatcagttggaagaatttgtccactacgtgaaaggcgagatcaccaaggtagtcggcaaataatgtctaacaattcgttcaagccgacgccgcttcgcggcgcggcttaactcaagcgttagatgcactatacgtaaccaactagtaggaacagtgaattggagttcgtcttgttataattagcttcttgggggatctttaaatactgtagaaaagaggaaggaaataataaatggctaaaatgagaatatcaccggaattgaaaaaactgatcgaaaaataccgctgcgtaaaagatacggaaggaatgtctcctgctaaggtatataagctggtgggagaaaatgaaaacctatatttaaaaatgacggacagccggtataaagggaccacctatgatgtggaacgggaaaaggacatgatgctatggctggaaggaaagctgcctgttccaaaggtcctgcactttgaacggcatgatggctggagcaatctgctcatgagtgaggccgatggcgtcctttgctcggaagagtatgaagatgaacaaagccctgaaaagattatcgagctgtatgcggagtgcatcaggctctttcactccatcgacatatcggattgtccctatacgaatagcttagacagccgcttagccgaattggattacttactgaataacgatctggccgatgtggattgcgaaaactgggaagaagacactccatttaaagatccgcgcgagctgtatgattttttaaagacggaaaagcccgaagaggaacttgtcttttcccacggcgacctgggagacagcaacatctttgtgaaagatggcaaagtaagtggctttattgatcttgggagaagcggcagggcggacaagtggtatgacattgccttctgcgtccggtcgatcagggaggatatcggggaagaacagtatgtcgagctattttttgacttactggggatcaagcctgattgggagaaaataaaatattatattttactggatgaattgttttagtacctagatacttcgctcgtgaaaagcagcgctcagggggctagtgcgctcttccgcttcctcgctcactgactcgctgcgctcggtcgttcggctgcggcgagcggtatcagctcactcaaaggcggtaatacggttatccacagaatcaggggataacgcaggaaagaacatgtgagcaaaaggccagcaaaaggccaggaaccgtaaaaaggccgcgttgctggcgtttttccataggctccgcccccctgacgagcatcacaaaaatcgacgctcaagtcagaggtggcgaaacccgacaggactataaagataccaggcgtttccccctggaagctccctcgtgcgctctcctgttccgaccctgccgcttaccggatacctgtccgcctttctcccttcgggaagcgtggcgctttctcatagctcacgctgtaggtatctcagttcggtgtaggtcgttcgctccaagctgggctgtgtgcacgaaccccccgttcagcccgaccgctgcgccttatccggtaactatcgtcttgagtccaacccggtaagacacgacttatcgccactggcagcagccactggtaacaggattagcagagcgaggtatgtaggcggtgctacagagttcttgaagtggtggcctaactacggctacactagaagaacagtatttggtatctgcgctctgctgaagccagttaccttcggaaaaagagttggtagctcttgatccggcaaacaaaccaccgctggtagcggtggtttttttgtttgcaagcagcagattacgcgcagaaaaaaaggatctcaagaagatcctttgatcttttctacggggtctgacgctcagtggaacgaaaactcacgttaagggattttggtcatgagattatcaaaaaggatcttcacctagatccttttaaattaaaaatgaagcgtacgttggaatcg

SEQ ID NO: 10 - DNA, 25277 bp, Artificial Sequence
  Nucleotide sequence of RV019929 construct
cttctacaaaactcacagaaacaatcaaacaaacatacacagcgatttattcacacgaacccgaattacaacggtatatatcctgtcagccaacaccaaaacatcaaaaaaatcgggatcaggatcaggatctgcggccgcatcctgcaggagctcaaacgagcaggaagcaacgagagggtggcgcgcgaccgacgtgcgtacgtagcatgagcctgagtggagacgttggacgtgtatgtatatacctctctgcgtgttaactatgtacgtaagcggcaggcagtgcaataagtgtggctctgtagtatgtacgtgcgggtacgatgctgtaagctactgaggcaagtccataaataaataatgacacgtgcgtgttctataatctcttcgcttcttcatttgtccccttgcggagtttggcatccattgatgccgttacgctgagaacagacacagcagacgaaccaaaagtgagttcttgtatgaaactatgacccttcatcgctaggctcaaacagcaccccgtacgaacacagcaaattagtcatctaactattagcccctacatgtttcagacgatacataaatatagcccatccttagcaattagctattggccctgcccatcccaagcaatgatctcgaagtatttttaatatatagtatttttaatatgtagcttttaaaattagaagataattttgagacaaaaatctccaagtatttttttgggtattttttactgcctccgtttttctttatttctcgtcacctagtttaattttgtgctaatcggctataaacgaaacagagagaaaagttactctaaaagcaactccaacagattagatataaatcttatatcctgcctagagctgttaaaaagatagacaactttagtggattagtgtatgcaacaaactctccaaatttaagtatcccaactacccaacgcatatcgttcccttttcattggcgcacgaactttcacctgctatagccgacgtacatgttcgttttttttgggcggcgcttactttcttccccgttcgttctcagcatcgcaactcaatttgttatggcggagaagcccttgtatcccaggtagtaatgcacagatatgcattattattattcataaaacgaacgctcttcaactggaagagcggttactaccggttcactagctagctgctaatcgagctagttaccctatgaggtgacatgaagcgctcacggttactatgacggttagcttcacgactgttggtggcagtagcgtacgacttagctatagttccggacttacctagctaggttaccagagctggtcaccttcttcatcgctaagaagacactcagtagtccggaccgatatcgctatcaactttgtatagaaaagttgggccagaatggcccggaccgggttaccaagcggccgcgccgggtgtgatttagtataaagtgaagtaatggtcaaaagaaaaagtgtaaaacgaagtacctagtaataagtaatattgaacaaaataaatggtaaagtgtcagatatataaaataggctttaataaaaggaagaaaaaaaacaaacaaaaaataggttgcaatggggcagagcagagtcatcatgaagctagaaaggctaccgatagataaactatagttaattaaatacattaaaaaatacttggatctttctcttaccctgtttatattgagacctgaaacttgagagagatacactaatcttgccttgttgtttcattccctaacttacaggactcagcgcatgtcatgtggtctcgttccccatttaagtcccacaccgtctaaacttattaaattattaatgtttataactagatgcacaacaacaaagcttgtgtttggaacccttgagaggttttagagctagaaatagcaagttaaaataaggctagtccgttatcaacttgaaaaagtggcaccgagtcggtgcttttttttgcggccccgtccactaactaatcgttaagcgggtttcccgttagctaagcactaggccggaatccccaagtttgtacaaaaaagcaggctccgtcgaccggaccgggttaccgaattccaccgggttaagagaattgtaagtgtgcttttatatatttaaaattaatatattttgaaatgttaaaatataaaagaaaattcaatgtaaattaaaaataaataaatgtttaataaagataaattttaaaacataaaagaaaatgtctaacaagaggattaagatcctgtgctcttaaatttttaggtgttgaaatcttagccatacaaaatatattttattaaaaccaagcatgaaaaaagtcactaaagagctatataactcatgcagctagaaatgaagtgaagggaatccagtttgttctcagtcgaaagagtgtctatctttgttcttttctgcaaccgagttaagcaaaatgggaatgcgaggtatcttcctttcgttaggggagcaccagatgcatagttagtcccacattgatgaatataacaagagcttcacagaatatatagcccaggccacagtaaaagcttgcataactgagggatctccagttttagagctagaaatagcaagttaaaataaggctagtccgttatcaacttgaaaaagtggcaccgagtcggtgctttttttcccgggcacccagctttcttgtacaaagtggggatcggccagaatggcccggaccgggttaccaagcggccgcaattggatcgggtttacttattttgtgggtatctatacttttattagatttttaatcaggctcctgatttctttttatttcgattgaattcctgaacttgtattattcagtagatcgaataaattataaaaagataaaatcataaaataatattttatcctatcaatcatattaaagcaatgaatatgtaaaattaatcttatctttattttaaaaaatcatataggtttagtatttttttaaaaataaagataggattagttttactattcactgcttattacttttaaaaaaatcataaaggtttagtatttttttaaaataaatataggaatagttttactattcactgctttaatagaaaaatagtttaaaatttaagatagttttaatcccagcatttgccacgtttgaacgtgagccgaaacgatgtcgttacattatcttaacctagctgaaacgatgtcgtcataatatcgccaaatgccaactggactacgtcgaacccacaaatcccacaaagcgcgtgaaatcaaatcgctcaaaccacaaaaaagaacaacgcgtttgttacacgctcaatcccacgcgagtagagcacagtaaccttcaaataagcgaatggggcataatcagaaatccgaaataaacctaggggcattatcggaaatgaaaagtagctcactcaatataaaaatctaggaaccctagttttcgttatcactctgtgctccctcgctctatttctcagtctctgtgtttgcggctgaggattccgaacgagtgaccttcttcgtttctcgcaaaggtaacagcctctgctcttgtctcttcgattcgatctatgcctgtctcttatttacgatgatgtttcttcggttatgtttttttatttatgctttatgctgttgatgttcggttgtttgtttcgctttgtttttgtggttcagttttttaggattcttttggtttttgaatcgattaatcggaagagattttcgagttatttggtgtgttggaggtgaatcttttttttgaggtcatagatctgttgtatttgtgttataaacatgcgactttgtatgattttttacgaggttatgatgttctggttgttttattatgaatctgttgagacagaaccatgatttttgttgatgttcgtttacactattaaaggtttgttttaacaggattaaaagttttttaagcatgttgaaggagtcttgtagatatgtaaccgtcgatagtttttttgtgggtttgttcacatgttatcaagcttaatcttttactatgtatgcgaccatatctggatccagcaaaggcgattttttaattccttgtgaaacttttgtaatatgaagttgaaattttgttattggtaaactataaatgtgtgaagttggagtatacctttaccttcttatttggctttgtgatagtttaatttatatgtattttgagttctgacttgtatttctttgaattgattctagtttaagtaatccatggcacctaaaaagaagaggaaagttatggacaaaaagtactccatagggctcgatatcggcacaaacagtgtggggtgggcagtcatcactgacgactacaaggtcccctccaagaagttcaaggtcctcggcaatacagaccgccactccatcaagaagaacctcatcggagcactgttgttcgactccggagaaactgccgaagcaaccagactcaagaggaccgccagaagaaggtacacaaggcgcaagaacaggatctgctacctccaggagatcttcagtaacgagatggcaaaggtcgacgactctttcttccacaggctcgaggaatccttcctcgtcgaggaggacaagaagcatgagagacaccccatcttcggaaacatcgtcgacgaggtaagtttctgcttctacctttgatatatatataataattatcattaattagtagtaatataatatttcaaatatttttttcaaaataaaagaatgtagtatatagcaattgcttttctgtagtttataagtgtgtatattttaatttataacttttctaatatatgaccaaaacatggtgatgtgcaggtcgcctaccacgagaagtacccaaccatctaccacctgaggaagaagctcgtcgacagtaccgacaaggctgacctcaggctcatctacctcgcactcgcccacatgattaagttcaggggccacttcctcatagagggagacctcaacccagacaactccgacgtcgacaaactcttcatccaactcgtgcagacctacaatcaactctttgaagagaacccaatcaacgcctccggagtggatgctaaggctatattgtccgccaggctctccaaatcaagacgcctcgaaaacctcatcgcccagctcccaggggagaagaaaaatagcctcttcgggaacctcatagccctgtcccttggactcacccctaacttcaaatcaaatttcgacctcgcagaggacgctaagcttcaactctccaaggacacctacgacgacgacctcgataacctcctcgcccaaatcggtgatcaatacgctgacctcttcctcgctgctaagaacctctccgacgccatactcctctccgacattctgagggtcaacaccgagatcacaaaggctcccttgtccgcctccatgattaaacgctacgacgaacaccaccaggacctcaccctcttgaaggcactggttagacagcagctccccgagaagtacaaggaaatcttcttcgaccaatcaaaaaacggctacgccggatacatcgacggaggagcatcccaggaagagttctacaagttcatcaaaccaattctcgaaaagatggacggaacagaggagctcttggtcaagctcaacagggaggacctcctcagaaagcagagaaccttcgacaacggcagtatcccccaccagatccaccttggagagttgcacgcaatcctcaggaggcaagaggacttctaccccttcctcaaggacaacagggagaagatcgagaagatccttacattccgcatcccctactacgtcggacctttggcaagaggaaactcccgcttcgcatggatgactcgcaagagtgaggaaaccatcaccccttggaacttcgaggaggtcgtcgataagggagcttcagcccagtccttcatcgagcgcatgaccaacttcgataaaaatctccccaatgaaaaagtcctccccaagcacagtctgctctacgagtacttcacagtctacaacgagctcaccaaggtcaagtacgtcaccgaaggcatgagaaaacccgccttcctcagtggcgagcagaagaaggcaatcgtggacttgctgttcaagaccaaccgcaaggtcacagtcaagcaattaaaagaggactacttcaagaaaatagagtgcttcgacagtgtcgagatctctggggtcgaggacaggttcaacgcatccttggggacctatcacgacctcctcaagatcattaaagacaaggacttcctcgacaacgaggagaacgaggacatactggaggacatcgtcctcaccctcactctctttgaggacagggagatgatagaggagcgcctcaaaacctacgcccacctcttcgacgacaaggtgatgaaacagctcaagaggcgcagatacaccggatggggtagactctccaggaagctgattaatggcatccgcgacaaacagtccggcaagaccatcctcgacttcctcaagagtgacggattcgccaaccgcaacttcatgcagctcatacacgacgactccctcaccttcaaggaggacatccaaaaagcccaagtctccggacagggagactcattgcacgaacacatcgccaacttggctggatctcctgctattaaaaagggcatcctccaaaccgtcaaggtggtcgacgaactcgtcaaggtcatgggtagacacaagcccgaaaatatcgtcatcgagatggcaagggagaaccagacaacccagaagggccaaaaaaactccagggagcgcatgaaacgcatcgaggagggaataaaggagctcgggtcccagatcctcaaggagcaccccgtcgaaaatactcaactccagaatgaaaagctctacctctactacctccaaaacggcagggatatgtacgtcgaccaagagctcgacattaatcgcctctccgactacgacgtcgatcacatcgtcccccagagtttcctcaaggacgactccatcgacaacaaggtcctcaccagatccgataaaaatcgcggaaagtccgacaacgtcccctctgaggaagtggttaagaagatgaaaaactactggagacagctcctcaacgcaaagctgatcacccagcgcaagttcgacaacctcacaaaggctgagagagggggactctctgagttggacaaggccggcttcatcaagagacaactcgtggaaacccgccagatcaccaagcatgtcgcacagattctcgactcccgcatgaatactaaatacgatgaaaatgacaagctcatcagggaggtcaaggtcatcaccctgaagtccaagctcgtctccgacttccgcaaggacttccagttctacaaggtccgcgagatcaacaactaccaccacgcccacgacgcatacctcaacgctgtggttggaacagcactcatcaagaagtaccccaagctcgagtccgagttcgtctacggcgactacaaggtctacgacgtcaggaagatgatcgccaagtccgagcaagagatcggaaaggccaccgcaaaatatttcttctactccaacataatgaacttcttcaaaaccgagatcaccctggctaacggagaaataaggaagaggcccctgatagaaaccaacggcgagacaggcgagattgtctgggacaaaggcagggacttcgcaaccgtcagaaaggtgctcagtatgcctcaggtcaacatagtcaaaaagaccgaagtccagactggaggattctccaaggagtccatcctccccaaaaggaactccgacaaactgatcgccaggaaaaaggactgggaccccaaaaaatatggcggcttcgactcccctactgttgcttacagtgtgctcgtcgtcgcaaaagtcgagaaggggaaatccaagaagctcaagtcagtgaaggagctcctcggcatcaccatcatggagaggtcctccttcgagaagaaccccatcgacttcctcgaggccaagggatataaggaggtcaagaaggacctcatcattaaactccccaagtactccctcttcgagctcgaaaacggacgcaagaggatgctcgcttcagctggtgaactccagaagggcaacgaactcgctttgccctctaaatacgtcaacttcctctacctcgcctcccactatgaaaagctcaagggctccccagaggacaacgagcagaagcaactcttcgtcgagcagcacaagcattacctcgacgagatcatcgagcagatctccgagttctccaagagagtcatcctcgctgacgcaaacctcgacaaggtcctcagtgcatataacaagcaccgcgacaaaccaataagggagcaggccgaaaatattatacacctgttcaccctcaccaacttgggagcaccagccgccttcaagtatttcgacaccaccatcgacagaaagcgctacacctccacaaaggaggtcctggacgccacacttatccaccagtccatcaccggcctctatgaaacacgcatcgacctctctcaattgggaggggacaagagaccaagagacagacacgatggagagcttggaggtagaaagagagcaaggtagttcgaactggccaggtaccgttaacctagacttgtccatcttctggattggccaacttaattaatgtatgaaataaaaggatgcacacatagtgacatgctaatcactataatgtgggcatcaaagttgtgtgttatgtgtaattactagttatctgaataaaagagaaagagatcatccatatttcttatcctaaatgaatgtcacgtgtctttataattctttgatgaaccagatgcatttcattaaccaaatccatatacatataaatattaatcatatataattaatatcaattgggttagcaaaacaaatctagtctaggtgtgttttgcaagcttggcgcgccgttaacttaacggcaaacgctaattagtcactaggcccaggaaacactaactaagccctagcttatcctagcgcaacctagttaggtcttggtaacccggtccgggccattctggccgatcccgggcaactttattatacaaagttgatagatatcggtccgacggccagaatggccatctggattcagcaggcctagaaggccatttagtcctagcgatatcaggatattcttgtttaagatgttgaactctatggaggtttgtatgaactgatgatctaggaccggataagttcccttcttcatagcgaacttattcaaagaatgttttgtgtatcattcttgttacattgttattaatgaaaaaatattattggtcattggactgaacacgagtgttaaatatggaccaggccccaaataagatccattgatatatgaattaaataacaagaataaatcgagtcaccaaaccacttgccttttttaacgagacttgttcaccaacttgatacaaaagtcattatcctatgcaaatcaataatcatacaaaaatatccaataacactaaaaaattaaaagaaatggataatttcacaatatgttatacgataaagaagttacttttccaagaaattcactgattttataagcccacttgcattagataaatggcaaaaaaaaacaaaaaggaaaagaaataaagcacgaagaattctagaaaatacgaaatacgcttcaatgcagtgggacccacggttcaattattgccaattttcagctccaccgtatatttaaaaaataaaacgataatgctaaaaaaatataaatcgtaacgatcgttaaatctcaacggctggatcttatgacgaccgttagaaattgtggttgtcgacgagtcagtaataaacggcgtcaaagtggttgcagccggcacacacgagtcgtgtttatcaactcaaagcacaaatacttttcctcaacctaaaaataaggcaattagccaaaaacaactttgcgtgtaaacaacgctcaatacacgtgtcattttattattagctattgcttcaccgccttagctttctcgtgacctagtcgtcctcgtcttttcttcttcttcttctataaaacaatacccaaagagctcttcttcttcacaattcagatttcaatttctcaaaatcttaaaaactttctctcaattctctctaccgtgatcaaggtaaatttctgtgttccttattctctcaaaatcttcgattttgttttcgttcgatcccaatttcgtatatgttctttggtttagattctgttaatcttagatcgaagacgattttctgggtttgatcgttagatatcatcttaattctcgattagggtttcatagatatcatccgatttgttcaaataatttgagttttgtcgaataattactcttcgatttgtgatttctatctagatctggtgttagtttctagtttgtgcgatcgaatttgtcgattaatctgagtttttctgattaacagccatggctgcaactactcttacatctgctttacctggtgctttcagttcatcccagagaccaagtgctcctttcaacttacaaagatcacctagagtgcttagaaggttcaacagaaagacaggacgtcaacctcgtggacttgttcgtgctgcaaaggctcaagcggcgcaaaacctgccagagaaattcgatgaaacaagactctgggaggccctcaggggatttggggttagtccaagtagggttacttacgctcccgtcggattcggagattaccactggaccgtcacagatgaagacgggagaccttggttcgcaactgtcagtgacctcgaacacaaagagcattgcgggcagggagcacaagcagcccttaaaggactcagacaagctatggacactgccctcgcacttagagatagggacggactcagattcgtggttgctccagtggcagcaacagatgggggtggccctgtccttccccttgacgctaggtatgcactcacagtcttccctcacgtcccaggaagaacaggagagttcggacaaagactcacagaggcagagagggacagactgcttgctcttctggcagaactccacggaagaacacctcctgaaacaaccccaccagccgatatggaaccaccaggacttcctggtgttagagcagcactcgccgaaagtgaaggaccttggagtggaggaccatttgcagaacccgctagacttcttctcagagaacacgaggccacactgcacgcaagactcgctgaattcgaagccctcgtcgcaagagttaagggtcgtggagcacctcttgtcgttacccacggagaaccacacccaggcaacttgatcctcggagaggaaggctatctcctcgtggactgggatacagttggactggctccagctgaaagggatttgagtctcatctcagacgacccagctgacctcgcaagatacgcagagcttacaggaagaactccagacccagacgcactcgcactctatagactgcgttggagtctccttgatgtggctgagttcgtcgagtggttcagggctgaacaccaaagaacccaagacaccgagagtgcatggaaggggttcactgacacacttgggcaattggctgctggtggatcagctgcatagcctaggaaacttatctctgttatgaatcagaagaagttcatgtctcgtttcatttaaaactttggtggtttgtgttttggggccttgtaaagcccctgatgaataattgttcaactatgtttccgttcctgtgttatacctttctttctaatgagtaatgacatcaaacttcttctgtattgaaattatgtccttgtgagtctctttatcatcgtttcgtctttacattatatgtgctacttttgtctaatgagcctgaaaagtggctccaatggtacgcactggaagatttgttggcttctggtagatatagcgacagtgttgagcttgtaatatcatgtctcttattgctaaattagttcctttcttaacagaaaccttcaaagtttttgtttttgttttcatttacctaatgtacacatacgctggccatgactaacaacatgtccaggcttagagcatatttttttctagcttaaattgttaacttgtcattcagtaaaatccgagaattgtgaagctctaattgaagctaattcgttttataaagtcagttaaaaagtatactaaattatccaacttttcttcaaaatctcaaaattctatgacaaaacgatagtctttgtttatgtcagtaccacaaagaggtggaaaaaaacaccaaaaaaacaataagcaaactatacactgagaagaaaaataaaagagagctcaatagatgttttatactaacggtagattagatcaaagatccaagctttactctacatagagcagaacccagaatcccttcatatctcttttattctagcaccgataatctactgaaaagaagacacttagagctctgtctctttgtcaaagaagtcccagccgtcatccagaagctccttacgttcattaacagagggtgattgcggttacatcatgtacggaaaaataattctaatccttgatttaaatttgaacttgactatttatttattctttatttcattttgtaaatcattttatgtatctcctggcaagcaattttatccaccttgcaccaacaccttcgggttccataatcaaaccaccttaacttcacaccatgctgtaactcacaccgcccagcatctccaatgtgaaagaagctaaaatttaataaacaatcatacgaagcagtgacaaaataccagatggtattaatgcttcgataaaattaattggaaagtataaaatggtagaaaataataaattataattaatttaagtaagataaaaaataattaaaaactaaaatgttaaaattttaaaaaaattattttaaataatatttaaaaacattaaaaatcattttaaaaaatttatttatagaacaattaaataaatatttcagctaataaaaaacaaaagcttacctagccttagaagacaacttgtccaacaattagatgatacccattgcccttacgttttctttaacatcaattattgtttttgtcaacaagctatcttttagttttattttattggtaaaaaatatgtcgccttcaagttgcatcatttaacacatctcgtcattagaaaaataaaactcttccctaaacgattagtagaaaaaatcattcgataataaataagaaagaaaaattagaaaaaaataacttcattttaaaaaaatcattaaggctatattttttaaatgactaattttatatagactgtaactaaaagtatacaatttattatgctatgtatcttaaagaattacttataaaaatctacggaagaatatcttacaaagtgaaaaacaaatgagaaagaatttagtgggatgattatgattttatttgaaaattgaaaaaataattattaaagactttagtggagtaagaaagctttcctattagtcttttcttatccataaaaaaaaaaaaaaaaatctagcgtgacagcttttccatagattttaataatgtaaaatactggtagcagccgaccgttcaggtaatggacactgtggtcctaacttgcaacgggtgcgggcccaatttaataacgccgtggtaacggataaagccaagcgtgaagcggtgaaggtacatctctgactccgtcaagattacgaaaccgtcaactacgaaggactccccgaaatatcatctgtgtcataaacaccaagtcacaccatacatgggcacgcgtcacaatatgattggagaacggttccaccgcatatgctataaaatgcccccacacccctcgaccctaatcgcacttcaattgcaatcaaattagttcattctctttgcgcagttccctacctctcctttcaaggttcgtagatttcttccgtttttttttcttcttctttattgtttgttctacatcagcatgatgttgatttgattgtgttttctatcgtttcatcgattataaattttcataatcagaagattcagcttttattaatgcaagaacgtccttaattgatgattttataaccgtaaattaggtctaattagagtttttttcataaagattttcagatccgtttacaacaagccttaattgttgattctgtagtcgtagattaaggtttttttcatgaactacttcagatccgttaaacaacagccttatttgttgatacttcagtcgtttttcaagaaattgttcagatccgttgataaaagccttattcgttgattctgtatggtatttcaagagatattgctcaggtcctttagcaactaccttatttgttgattctgtggccatagattaggattttttttcacgaaattgcttcttgaaattacgtgatggattttgattctgatttatcttgtgattgttgactctacagatggcctcctccgagaacgtcatcaccgagttcatgcgcttcaaggtgcgcatggagggcaccgtgaacggccacgagttcgagatcgagggcgagggcgagggccgcccctacgagggccacaacaccgtgaagctgaaggtgacgaagggcggccccctgcccttcgcctgggacatcctgtccccccagttccagtacggctccaaggtgtacgtgaagcaccccgccgacatccccgactacaagaagctgtccttccccgagggcttcaagtgggagcgcgtgatgaacttcgaggacggcggcgtggcgaccgtgacccaggactcctccctgcaggacggctgcttcatctacaaggtgaagttcatcggcgtgaacttcccctccgacggccccgtgatgcagaagaagaccatgggctgggaggcctccaccgagcgcctgtacccccgcgacggcgtgctgaagggcgagacccacaaggccctgaagctgaaggacggcggccactacctggtggagttcaagtccatctacatggccaagaagcccgtgcagctgcccggctactactacgtggacgccaagctggacatcacctcccacaacgaggactacaccatcgtggagcagtacgagcgcaccgagggccgccaccacctgttcctgtagttttgtgatctgatgataagtggttggttcgtgtctcatgcacttgggaggtgatctatttcacctggtgtagtttgtgtttccgtcagttggaaaaacttatccctatcgatttcgttttcattttctgcttttcttttatgtaccttcgtttgggcttgtaacgggcctttgtatttcaactctcaataataatccaagtgcatgttaaacaatttgtcatctgtttcggctttgatatactactggtgaagatgggccgtactactgcatcacaacgaaaaataataataagatgaaaaacttgaagtggaaaaaaaaaaaacttgaatgttcactactactcattgaccataatgtttaacatacatagctcaatagtatttttgtgaatatggcaacacaaacagtccaaaacaattgtctcttactataccaaaccaagggcgccgcttgtttgccactctttgtgtgcaatagtgtgattaccacatctccacattcaatatattccctgaattatctgacgattttgatggctcactgttttcccaagtcttgaattgtcttctgtgcgccagtcaaatgcatatgtgttgagtttatcttttaaatatcaagcttttgtttttaacttttgtttgtaaccaaaaactcacagtaggagtttgatcacataattttatgtttgcctttgcaatttctagtgagtctttgattaaaagcttgaaaagaaaatgcagccaagcttaccaagtaagttatgtgtattaaccagaggaagagagaatcttgcaaaatttcaacaaacacaaaaagaagtattactacgattggtggagaaagaaaacgattccaaatcttgaactgttgttgtaaaagcatagcagaaagtgggagacaaccgaaatagaaatgactataacttaatttaatgttatcattataatttcttctagcaaatatttagaaagtaaatatcacatcaacctttaatgtaattaagctttctctttttgattcatgtgagatgaaaagaaaaaaaagaagagaaaagtgtagaaaacacatcatttctaagctgaagccacttacgcttgattccgatgacttcgtaggttcctagctcaagccgctcgtgtccaagcgtcacttacgattagctaatgattacggcatctaggaccgactagttcttatgtgcttctagtctccaaatgtggttgatagttattttgctctaagatcaacagtaatgaagtataaatcatcgttgtggtgtgctactcggttaattgagcattaacacacacaaacatgacgaggatggtataatctccaaaaatgtgtactttgttaggtgggaccctatagccttgattaatgtgctatgttaggcatgcctggaaacgtgtgacgcatatgttttgtgaacctgttgatattatatgtgcttttatattaccatattttattaaaatactaatatttattactagtaagatataacattctatctagcttaaaaactaaccataaatattccataataactagatttaccaaactaatatactaaatatacataataaatacaaaattaacaagacaataatcaatatttatgagcttaatatatttagacattatggttggtcgacgataatcatgctaacttttcgtaattgcttgattgaaatatgcttagaataatgcctctttgttctacatggcaaatagggaccattatggtgtaacaccctgggaaccacaaacaccccgaaatgctactaaactacacaactaaccttcatatataaaatttcgacagcatctcctttgaaaatttgcatagacgtggaagcaacagagtataaacagatctagctagctaagtttaaacggccggccaaacgtgcaagcgctactagacaattcagtacattaaaaacgtccgcaatgtgttattaagttgtctaagcgtcaatttatttacaattgaatatatcctgccaccagccagccaacagctccccgaccggcagctcggcacaaaatcaccactcgatacaggcagcccatcagtccgggacggcgtcagcgggagagccgttgtaaggcggcagactttgctcatgttaccgatgctattcggaagaacggcaactaagctgccgggtttgaaacacggatgatctcgcggagggtagcatgttgattgtaacgatgacagagcgttgctgcctgtgatcaaatatcatctccctcgcagagatccgaattatcagccttcttattcatttctcgcttaaccgtgacaggcgcgcgcggtgccacctgggtccttttcatcacgtgctataaaaataattataatttaaattttttaatataaatatataaattaaaaatagaaagtaaaaaaagaaattaaagaaaaaatagtttttgttttccgaagatgtaaaagactctagggggatcgccaacaaatactaccttttatcttgctcttcctgctctcaggtattaatgccgaattgtttcatcttgtctgtgtagaagaccacacacgaaaatcctgtgattttacattttacttatcgttaatcgaatgtatatctatttaatctgcttttcttgtctaataaatatatatgtaaagtacgctttttgttgaaattttttaaacctttgtttatttttttttcttcattccgtaactcttctaccttctttatttactttctaaaatccaaatacaaaacataaaaataaataaacacagagtaaattcccaaattattccatcattaaaagatacgaggcgcgtgtaagttacaggcaagcgatccgtcctaagaaaccattattatcatgacattaacctataaaaataggcgtatcacgaggccctttcgtctcgcgcgtttcggtgatgacggtgaaaacctctgacacatgcagctcccggagacggtcacagcttgtctgtaagcggatgccgggagcagacaagcccgtcagggcgcgtcagcgggtgttggcgggtgtcggggctggcttaactatgcggcatcagagcagattgtactgagagtgcaccataccacagcttttcaattcaattcatcattttttttttattcttttttttgatttcggtttctttgaaatttttttgattcggtaatctccgaacagaaggaagaacgaaggaaggagcacagacttagattggtatatatacgcatatgtagtgttgaagaaacatgaaattgcccagtattcttaacccaactgcacagaacaaaaacctgcaggaaacgaagataaatcatgtcgaaagctacatataaggaacgtgctgctactcatcctagtcctgttgctgccaagctatttaatatcatgcacgaaaagcaaacaaacttgtgtgcttcattggatgttcgtaccaccaaggaattactggagttagttgaagcattaggtcccaaaatttgtttactaaaaacacatgtggatatcttgactgatttttccatggagggcacagttaagccgctaaaggcattatccgccaagtacaattttttactcttcgaagacagaaaatttgctgacattggtaatacagtcaaattgcagtactctgcgggtgtatacagaatagcagaatgggcagacattacgaatgcacacggtgtggtgggcccaggtattgttagcggtttgaagcaggcggcagaagaagtaacaaaggaacctagaggccttttgatgttagcagaattgtcatgcaagggctccctatctactggagaatatactaagggtactgttgacattgcgaagagcgacaaagattttgttatcggctttattgctcaaagagacatgggtggaagagatgaaggttacgattggttgattatgacacccggtgtgggtttagatgacaagggagacgcattgggtcaacagtatagaaccgtggatgatgtggtctctacaggatctgacattattattgttggaagaggactatttgcaaagggaagggatgctaaggtagagggtgaacgttacagaaaagcaggctgggaagcatatttgagaagatgcggccagcaaaactaaaaaactgtattataagtaaacgcgcgcgggcgcgcctaaaacagcttgcgtcatgcggtcgctgcgtatatgatgcgatgagtaaataaacaaatacgcaaggggaacgcatgaaggttatcgctgtacttaaccagaaaggcgggtcaggcaagacgaccatcgcaacccatctagcccgcgccctgcaactcgccggggccgatgttctgttagtcgattccgatccccagggcagtgcccgcgattgggcggccgtgcgggaagatcaaccgctaaccgttgtcggcatcgaccgcccgacgattgaccgcgacgtgaaggccatcggccggcgcgacttcgtagtgatcgacggagcgccccaggcggcggacttggctgtgtccgcgatcaaggcagccgacttcgtgctgattccggtgcagccaagcccttacgacatatgggccaccgccgacctggtggagctggttaagcagcgcattgaggtcacggatggaaggctacaagcggcctttgtcgtgtcgcgggcgatcaaaggcacgcgcatcggcggtgaggttgccgaggcgctggccgggtacgagctgcccattcttgagtcccgtatcacgcagcgcgtgagctacccaggcactgccgccgccggcacaaccgttcttgaatcagaacccgagggcgacgctgcccgcgaggtccaggcgctggccgctgaaattaaatcaaaactcatttgagttaatgaggtaaagagaaaatgagcaaaagcacaaacacgctaagtgccggccgtccgagcgcacgcagcagcaaggctgcaacgttggccagcctcgcagacacgccagccatgaagcgggtcaactttcagttgccggcggaggatcacaccaagctgaagatgtacgcggtacgccaaggcaagaccattaccgagctgctatctgaatacatcgcgcagctaccagagtaaatgagcaaatgaataaatgagtagatgaattttagcggctaaaggaggcggcatggaaaatcaagaacaaccaggcaccgacgccgtggaatgccccatgtgtggaggaacgggcggttggccaggcgtaagcggctgggttgcctgccggccctgcaatggcactggaacccccaagcccgaggaatcggcgtgagcggtcgcaaaccatccggcccggtacaaatcggcgcggcgctgggtgatgacctggtggagaagttgaaggcagcgcaggccgcccagcggcaacgcatcgaggcagaagcacgccccggtgaatcgtggcaagcagccgctgatcgaatccgcaaagaatcccggcaaccgccggcagccggtgcgccgtcgattaggaagccgcccaagggcgacgagcaaccagattttttcgttccgatgctctatgacgtgggcacccgcgatagtcgcagcatcatggacgtggccgttttccgtctgtcgaagcgtgaccgacgagctggcgaggtgatccgctacgagcttccagacgggcacgtagaggtttccgcagggccggcaggcatggccagtgtgtgggattacgacctggtactgatggcggtttcccatctaaccgaatccatgaaccgataccgggaagggaagggagacaagcccggccgcgtgttccgtccacacgttgcggacgtactcaagttctgccggcgagccgatggcggaaagcagaaagacgacctggtagaaacctgcattcggttaaacaccacgcacgttgccatgcagcgtacgaagaaggccaagaacggccgcctggtgacggtatccgagggtgaagccttgattagccgctacaagatcgtaaagagcgaaaccgggcggccggagtacatcgagatcgagctagctgattggatgtaccgcgagatcacagaaggcaagaacccggacgtgctgacggttcaccccgattactttttgatcgatcccggcatcggccgttttctctaccgcctggcacgccgcgccgcaggcaaggcagaagccagatggttgttcaagacgatctacgaacgcagtggcagcgccggagagttcaagaagttctgtttcaccgtgcgcaagctgatcgggtcaaatgacctgccggagtacgatttgaaggaggaggcggggcaggctggcccgatcctagtcatgcgctaccgcaacctgatcgagggcgaagcatccgccggttcctaatgtacggagcagatgctagggcaaattgccctagcaggggaaaaaggtcgaaaaggtctctttcctgtggatagcacgtacattgggaacccaaagccgtacattgggaaccggaacccgtacattgggaacccaaagccgtacattgggaaccggtcacacatgtaagtgactgatataaaagagaaaaaaggcgatttttccgcctaaaactctttaaaacttattaaaactcttaaaacccgcctggcctgtgcataactgtctggccagcgcacagccgaagagctgcaaaaagcgcctacccttcggtcgctgcgctccctacgccccgccgcttcgcgtcggcctatggcgcgccggaaaatatgcatggcatgcccgttccatacagaagctgggcgaacaaacgatgctcgccttccagaaaaccgaggatgcgaaccacttcatccggggtcagcaccaccggcaagcgccgcgacggccgaggtcttccgatctcctgaagccagggcagatccgtgcacagcaccttgccgtagaagaacagcaaggccgccaatgcctgacgatgcgtggagaccgaaaccttgcgctcgttcgccagccaggacagaaatgcctcgacttcgctgctgcccaaggttgccgggtgacgcacaccgtggaaacggatgaaggcacgaacccagtggacataagcctgttcggttcgtaagctgtaatgcaagtagcgtatgcgctcacgcaactggtccagaaccttgaccgaacgcagcggtggtaacggcgcagtggcggttttcatggcttgttatgactgtttttttggggtacagtctatgcctcgggcatccaagcagcaagcgcgttacgccgtgggtcgatgtttgatgttatggagcagcaacgatgttacgcagcagggcagtcgccctaaaacaaagttaaacatcatgagggaagcggtgatcgccgaagtatcgactcaactatcagaggtagttggcgtcatcgagcgccatctcgaaccgacgttgctggccgtacatttgtacggctccgcagtggatggcggcctgaagccacacagtgatattgatttgctggttacggtgacggtaaggcttgatgaaacaacgcggcgagctttgatcaacgaccttttggaaacttcggcttcccctggagagagcgagattctccgcgctgtagaagtcaccattgttgtgcacgacgacatcattccgtggcgttatccagctaagcgcgaactgcaatttggagaatggcagcgcaatgacattcttgcaggtatcttcgagccagccacgatcgacattgatctggctatcttgctgacaaaagcaagagaacatagcgttgccttggtaggtccagcggcggaggaactctttgatccggttcctgaacaggatctatttgaggcgctaaatgaaaccttaacgctatggaactcgccgcccgactgggctggcgatgagcgaaatgtagtgcttacgttgtcccgcatttggtacagcgcagtaaccggcaaaatcgcgccgaaggatgtcgctgccgactgggcaatggagcgcctgccggcccagtatcagcccgtcatacttgaagctagacaggcttatcttggacaagaagaagatcgcttggcctcgcgcgcagatcagttggaagaatttgtccactacgtgaaaggcgagatcaccaaggtagtcggcaaataatgtctaacaattcgttcaagccgacgccgcttcgcggcgcggcttaactcaagcgttagatgcactatacgtaaccaactagtaggaacagtgaattggagttcgtcttgttataattagcttcttgggggatctttaaatactgtagaaaagaggaaggaaataataaatggctaaaatgagaatatcaccggaattgaaaaaactgatcgaaaaataccgctgcgtaaaagatacggaaggaatgtctcctgctaaggtatataagctggtgggagaaaatgaaaacctatatttaaaaatgacggacagccggtataaagggaccacctatgatgtggaacgggaaaaggacatgatgctatggctggaaggaaagctgcctgttccaaaggtcctgcactttgaacggcatgatggctggagcaatctgctcatgagtgaggccgatggcgtcctttgctcggaagagtatgaagatgaacaaagccctgaaaagattatcgagctgtatgcggagtgcatcaggctctttcactccatcgacatatcggattgtccctatacgaatagcttagacagccgcttagccgaattggattacttactgaataacgatctggccgatgtggattgcgaaaactgggaagaagacactccatttaaagatccgcgcgagctgtatgattttttaaagacggaaaagcccgaagaggaacttgtcttttcccacggcgacctgggagacagcaacatctttgtgaaagatggcaaagtaagtggctttattgatcttgggagaagcggcagggcggacaagtggtatgacattgccttctgcgtccggtcgatcagggaggatatcggggaagaacagtatgtcgagctattttttgacttactggggatcaagcctgattgggagaaaataaaatattatattttactggatgaattgttttagtacctagatacttcgctcgtgaaaagcagcgctcagggggctagtgcgctcttccgcttcctcgctcactgactcgctgcgctcggtcgttcggctgcggcgagcggtatcagctcactcaaaggcggtaatacggttatccacagaatcaggggataacgcaggaaagaacatgtgagcaaaaggccagcaaaaggccaggaaccgtaaaaaggccgcgttgctggcgtttttccataggctccgcccccctgacgagcatcacaaaaatcgacgctcaagtcagaggtggcgaaacccgacaggactataaagataccaggcgtttccccctggaagctccctcgtgcgctctcctgttccgaccctgccgcttaccggatacctgtccgcctttctcccttcgggaagcgtggcgctttctcatagctcacgctgtaggtatctcagttcggtgtaggtcgttcgctccaagctgggctgtgtgcacgaaccccccgttcagcccgaccgctgcgccttatccggtaactatcgtcttgagtccaacccggtaagacacgacttatcgccactggcagcagccactggtaacaggattagcagagcgaggtatgtaggcggtgctacagagttcttgaagtggtggcctaactacggctacactagaagaacagtatttggtatctgcgctctgctgaagccagttaccttcggaaaaagagttggtagctcttgatccggcaaacaaaccaccgctggtagcggtggtttttttgtttgcaagcagcagattacgcgcagaaaaaaaggatctcaagaagatcctttgatcttttctacggggtctgacgctcagtggaacgaaaactcacgttaagggattttggtcatgagattatcaaaaaggatcttcacctagatccttttaaattaaaaatgaagcgtacgttggaatcg

SEQ ID NO: 11 - DNA, 19 bp, Artificial Sequence
  Nucleotide sequence of FAD2-F1 primer
tcgtgtggccaaagtggaa

SEQ ID NO: 12 - DNA, 22 bp, Artificial Sequence
  Nucleotide sequence of FAD2-R1 primer
tttgtgtttggaacccttgaga

SEQ ID NO: 13 - DNA, 16 bp, Artificial Sequence
  Nucleotide sequence of FAD2-T1 probe
ttcaagggaagaagcc

SEQ ID NO: 14 - DNA, 19 bp, Artificial Sequence
  Nucleotide sequence of FAD2-F2 primer
ccgtgtggccaaagttgaa

SEQ ID NO: 15 - DNA, 16 bp, Artificial Sequence
  Nucleotide sequence of FAD2-T2 probe
ttcagcagaagaagcc

SEQ ID NO: 16 - DNA, 21 bp, Artificial Sequence
  Nucleotide sequence of FAD3-F1 primer
taatggataccaaaaggaagc

SEQ ID NO: 17 - DNA, 24 bp, Artificial Sequence
  Nucleotide sequence of FAD3-R2 primer
caagcacatccctgagaacataac

SEQ ID NO: 18 - DNA, 17 bp, Artificial Sequence
  Nucleotide sequence of FAD3-T2 probe
aatccatggagatccct

SEQ ID NO: 19 - DNA, 21 bp, Artificial Sequence
  Nucleotide sequence of FAD3-F2 primer
ataccaacaaaagggttcttc

SEQ ID NO: 20 - DNA, 23 bp, Artificial Sequence
  Nucleotide sequence of SIP-130F primer
ttcaagttgggctttttcagaag

SEQ ID NO: 21 - DNA, 22 bp, Artificial Sequence
  Nucleotide sequence of SIP-198R primer
tctccttggtgctctcatcaca

SEQ ID NO: 22 - DNA, 15 bp, Artificial Sequence
  Nucleotide sequence of SIP-170T probe
ctgcagcagaaccaa

SEQ ID NO: 23 - DNA, 27 bp, Artificial Sequence
  Nucleotide sequence of PCR primer WOL1007
actacctggtttaaaattgagggattg

SEQ ID NO: 24 - DNA, 27 bp, Artificial Sequence
  Nucleotide sequence of PCR primer WOL1008
tgtcacttccctccattcattttgtac

SEQ ID NO: 25 - DNA, 28 bp, Artificial Sequence
  Nucleotide sequence of PCR primer WOL1009
atggcttattttccatgagaaataaggg

SEQ ID NO: 26 - DNA, 25 bp, Artificial Sequence
  Nucleotide sequence of PCR primer WOL1100
tctaggttattacgcaccacccacc

SEQ ID NO: 27 - DNA, 28 bp, Artificial Sequence
  Nucleotide sequence of PCR primer WOL1101
aagttgtctaaagccaaatgaaatgagg

SEQ ID NO: 28 - DNA, 25 bp, Artificial Sequence
  Nucleotide sequence of PCR primer WOL1102
ccctgagaaaagagaggaaccacac

SEQ ID NO: 29 - DNA, 31 bp, Artificial Sequence
  Nucleotide sequence of PCR primer WOL1103
ttcaattcaatcaatgaagaatgaaataatg

SEQ ID NO: 30 - DNA, 45770 bp, Artificial Sequence
  Nucleotide sequence of RV005393 construct
atggatggtactttggagatatgagcacttgccagacttcccggtcggagacttaaaaattccgataagaggttacggacgacggaccttataagtggatcgtctagtggtggcgccgatcaaaacagttccgcccccggctttgctcaaagtagcaaagcagctttatctcgggttgcggaggattttctagaaaaccgcaattttgcaggagagaacatatggccatcatcaagccgcatgtgaacaaaaataggacaacctcgccgatagagagaccggagtctctcatagaggaaatgagcggcagtcatccgccgagtggttttaccaacctggatctcgctatgatcgagctggaggactttgtccatcggtgcccgctcccagaagacaatcttgctggtcagaaggagtgagacgatggatccgtctagcaatgagaatgtctatgtgggtcgcggtcacaacatcgaaaatgatgatgacactgaccccaggcgttggaagaaggcgaatatcagttccaacaccatctccgatattcagatgacgaatggcgaagacgtacaatcagggagccctacccgaacggaagttgtaagcccacgtctggattatggatcggtcgactcctcctccagcctttattctggcagcgagcacggaaatcaagctgagattcaaaaagagctgtccgtcttgttctcgaacatgtctttgccaggcaacgatcggcgcccggacgaatacattctcgtgcatcaaacgggacaagatgcttttactggtattgccaaaggcaacctcgaccaaatgcccaccaaggcggaatttaacgcgtgctgccgtctctacagggacggagccggtaattactacccgccacctctcgcattcgacaagattagcgttccagagcaactggaggaaaaatgggggatgatggaggcgaaggaacgtaacaaactgcggtttcagtacaagttggacgtatggaatcatgcgcacgctgatatggggatcacgggcacagagatcttttatcaaacagataagaacataaagctcgaccggaattataaactaagacctgaagaccgatacgtacaaacagaaaaatacgggcgccgggaaattcaaaagcgatatcaacacgaactccaggctggttcgctgctgcccgatattatgatcaaaactccccaaaatgacatccacttcgtgtacaggtttgccggcgacaattacgccaacaaacagttcagcgagtttgaacacaccgtcaagcgcaggtatggcgacgagactgagatcaaattgaagtcaaagtcaggcattatgcatgactcgaaatatctggaatcctgggaacggggcagtgcggatattcgcttcgcggaattcgttggggaaaatagagctcacaatcggcagtttccaactgcgacagtaaatatgggacagcagccagacgggcagggcggtttgacccgcgaccgtcatgtgagcgttgacttcctaatgcaaagcgcacccaattcgccttgggcgcaagctttgaaaaagggagaactgtgggatcgcgttcagttgcttgctcgcgacggcaaccgctatctgtcgccgcccagattggaatattctgaccctgcacatttcaccgagttgatgaaccgggttggtttacccgcatcgatgggtcggcaaagccatgcggctagtatcaaattcgaaaagtttgacgcgcaggcagcggttattgtcttaaatggcccagagttacgtgacattcatgacttgtctcctgaaaaactgcaaaatttgtccaccaaagatgtcatcgtcgccgatcgcaatgagaatggtcagagaactggcacgtacaccagcgtcgcggaatatgagcgcttgcagttaaggctgccacccgatgcagcgggggtgcttggtgaagcaactgacaaatattcacgtgatttcgttcggccagagccggcgtcgcgtccaatcagtgacagccgcaggatatacgaaagtcgaccgcgtagccaaagcgtcaacagcttttgacgttcctgctgccgcgtcaacgaggaagctcgtttgacccgggtttgccaatgaaagggctcaatcatggtgaacactacaaagaaaagttttgcgaagtcgcttacggcagatatgcgccgttctgctcagcgcgttgtcgagcaaatgcgaaaagcattgattaccgaagaagaggcgctcaagcggcaagccagactggagagtcccgataggaagcgaaagtatgctgctgatatggcgatagtcgacaaactcgacgtagggtttcgaggcgaaataggctataaaattcttggaaataaccggcttcgagtagacaaccataaagaattaacgcgtgagcacggtagacttcgcaaaaccaaaacggttctgaagcgtaacccggtgacgcaggaagtctatttgggtttatatgaaaggaagtcctggttaagtgtcagcagccatttgtatgctgcggacggcacactccgcatgaagcacgtgaaatacaaagacggacgttttgaggaaaaatgggagcgcgacgaaaatggcgacctgatccgcacaaggtacgccaaccgtggcaggctctttcaacctgtatccgagaaaatgggcgcgccgtatcggagcggccctgacgaccggctctatcgcgatctaacccgtcgaaacggtttcagacgggagacattcgaacgggacgatcacggaaacctcgagcgtatcggcagcaaccatgtcggcttttccaagatttcagtgaaggcacccaatcgtcaaacctcccagacgaagattcaaaaacttggtggcgctttcaacaaatcttttaggtcccttctggacaaggagggcaatgaaatgggccgcgatattttgagccatcgacggctctataacaagcggtctgctgtctacgatgaagctaccggacaattgaagagtgccaagcataccttcggcaagatctacaggagcgaaaccgaatatctcagcgcgggcctcaagaaggtttcaaaaaagatactcggggtgacggtctaccggaaatttgcggcgctcagcgagcgagaatccgaggctgagagactgcgtagttttgaatccggtgcgcatcgccagatctggcaggagcgggcagcgattcccggttcgcccctcccggagactgatgacattcatttcgcacagcagtcgcacctagccaaagccaaccctgatcacgtcgaagctgacgtcacgcgtgtgacagatcaacatgttgatgttgctggacaaacatcatcgtctccccaacggaacttggaaggatggttagattctcaatcacgatacaagccagcaaacatgctgttgtcaaatccagaccttcaagcgaacggacctcgcccatacgaagggttagctcatctcaccctccggcgcgataatgaatctgacgggcacaaggagaatgatcagcggctgcgacatttctcccagccagagccgttggtgttaccgcatcccgggtcgccggaaataactaaggtgtttggctcgcggggagagccggcacacccgagtggaaatctgcacacggcggttggagaaacggcttgcgaaggaccggtgatgtcttcatcctcggacaatcatcagccagctccaggacagcaagaacttttaagtttccttcataatgcgccagccccagtttctgtggcaatacatgatgatcaagagcgacttgcgggggaggcgcccggcggctctttcagaggtagctcagggcgaacgagttcaatgtcggagagtatcttcgacgaagatgtacaagggcatttggtacgggattattcgatcaatactactaacgggtttattgacccgcaatcgttgttcggtgaaccggacttatcgagaggtccaaaatcggggccagaaattccatcggaagattaccatttgtcagcttcggaacaggaaaatttgctgaatcaattgcttagtgtgccactgccggttccttcaccgaagcccgaatgcgcgaggtctatgattttcgaaggttcacgttcaagagagcgttccacctccagagggttctaaggtggaacgcgtctaggcttgcctatcatcaccacctcatgatggtcgcggagaccttcgaagagatatccgacatcattggagaagctgggccggaaactagtgtacctcgcgaatgcatctagatccaatccaatatgcatggcatgccgaatccatgtgggagtttattcttgacacagatatttatgatataataactgagtaagcttaacataaggaggaaaaacatatgttacgcagcagcaacgatgttacgcagcagggcagtcgccctaaaacaaagttaggtggctcaagtatgggcatcattcgcacatgtaggctcggccctgaccaagtcaaatccatgcgggctgctcttgatcttttcggtcgtgagttcggagacgtagccacctactcccaacatcagccggactccgattacctcgggaacttgctccgtagtaagacattcatcgcgcttgctgccttcgaccaagaagcggttgttggcgctctcgcggcttacgttctgcccaagtttgagcagccgcgtagtgagatctatatctatgatctcgcagtctccggcgagcaccggaggcagggcattgccaccgcgctcatcaatctcctcaagcatgaggccaacgcgcttggtgcttatgtgatctacgtgcaagcagattacggtgacgatcccgcagtggctctctatacaaagttgggcatacgggaagaagtgatgcactttgatatcgacccaagtaccgccacctaataatgtctaacaattcgttcaagccgacgccgcttcgcggcgcggcttaactcaagcgttagatgcactatacgtaccaatccaaatcggatccccctgcatattttcctcctcgagttggatgaactcgccgagttcatcgtcaactgaaacagacacggccggattctgtgagacaggttgaaccgcagctctcttccattgataataggtctgaacggaaatacccacgatcttaacggcgtccttcaaggttgcgccgccagcgacctgagcttcgatttgaccgatcttctccagtttttctcggttgctgaggccgcgggttttcggcttcacggatttgaacgatcccgtgcgggctgtttcggctggtgctttctttgctcttctacctctaggagcagccggctcaacttcggcagcagcagtaccgtccggcggattctggatctcttcgtcagccattaatcgtcctctgtgtgggttattgctttgtctgccagctcgatccaagagtcaacgtttgtgcctagagtcgagcaagacgtttcccgttgaatatggctcataacaccccttgtattactgtttatgtaagcagacagttttattgttcatgatgatatatttttatcttgtgcaatgtaacatcagagattttgagacacaacgtggctttgttgaataaatcgaacttttgctgagttgaaggatcagatcacgcatcttcccgacaacgcagaccgttccgtggcaaagcaaaagttcaaaatcaccaactggtccacctacaacaaagctctcatctagcgtggactcaaggctctcgcgaatggctcgcgttggaaactttcattgacacttgaggggcaccgcagggaaattctcgtccttgcgagaaccggctatgtcgtgctgcgcatcgagcctgcgcccttggcttgtctcgcccctctccgcgtcgctacggggcttccagcgcctttccgacgctcaccgggctggttgccctcgccgctgggctggcggccgtctatggccctgcaaacgcgccagaaacgccgtcgaagccgtgtgcgagacaccgcggccgccggcgttgtggatacctcgcggaaaacttggccctcactgacagatgaggggcggacgttgacacttgaggggccgactcacccggcgcggcgttgacagatgaggggcaggctcgatttcggccggcgacgtggagctggccagcctcgcaaatcggcgaaaacgcctgattttacgcgagtttcccacagatgatgtggacaagcctggggataagtgccctgcggtattgacacttgaggggcgcgactactgacagatgaggggcgcgatccttgacacttgaggggcagagtgctgacagatgaggggcgcacctattgacatttgaggggctgtccacaggcagaaaatccagcatttgcaagggtttccgcccgtttttcggccaccgctaacctgtcttttaacctgcttttaaaccaatatttataaaccttgtttttaaccagggctgcgccctgtgcgcgtgaccgcgcacgccgaaggggggtgcccccccttctcgaaccctcccggcccgctaacgcgggcctcccatccccccaggggctgcgcccctcggccgcgaacggcctcaccccaaaaatggcagcgctggcagtccttgccattgccgggatcggggcagtaacgggatgggcgatcagcccgagcgcgacgcccggaagcattgacgtgccgcaggtgctggcatcgacattcagcgaccaggtgccgggcagtgagggcggcggcctgggtggcggcctgcccttcacttcggccgtcggggcattcacggacttcatggcggggccggcaatttttaccttgggcattcttggcatagtggtcgcgggtgccgtgctcgtgttcaattcagcgggttcgtgcgatccgtctgcatgatggtgatagccgtcagcatgattttcgtgtcgtcgaacttggtgaagggcattctcggcggcgatcacgacgccggccctgcggagccttcgccgcgtgcgcgattcatggcggccgtggaggccaaggatttcgcgcgagtgcaagagctgatcgaggcgcgtggagccaagtcggcggctgattatgtccttgcgcagctcgccgtggccgaaggtctggaccgcaagcctggtgcgcgcgtcgtggtcgggaaagcggcgggcagcatggcaatgccgcctgcggcgctgggttttacgccaaggggagaagcggcatacgccatcgagcggtcagcctatggtgagccgaggtccagcattgcgaagcagtaccagcaggaatggaaccggaaggcggcgacctggtgggcgatggccggtgtggccggcatcatcggcgcgatcctggcggcggcggcaaccggctttgttgggctggcagtgtcgatccgcaaccgagtgaagcgcgtgcgcgacctgttggtgatggagccgggtgcagagccataagcggcaagagacgaaagcccggtttccgggcttttgttttgttacgccaaggacgagttttagcggctaaaggtgttgacgtgcgagaaatgtttagctaaacttctctcatgtgctggcggctgtcaccgctatgttcaaccaaggcgcggagcaaattatgggtgttatccatgaagaaacggcttaccgaaagccagtttcaggaggcgatccaggggctggaagtggggcagcagaccatcgagatagcgcggggcgtcttagtcgatgggaagccacaggcgacgttcgcaacgtcgctgggactgaccaggggcgcagtgtcgcaagcggtgcatcgcgtgtgggccgcgttcgaggacaagaacttgcccgaggggtacgcgcgggtaacggcggttctgccggaacatcaggcgtacatcgtccggaagtgggaagcggacgccaagaaaaaacaggaaaccaaacgatgaaaactttggtcacggccaaccagaaaggcggcgtcggcaagacttcgacccttgtgcatcttgccttcgactttttcgagcgcggcttgcgggttgccgtgatcgacctggacccccagggcaatgcgtcctacacgctcaaggactttgctaccggcctgcatgcaagcaagctgttcggcgctgtccctgccggcggctggaccgaaaccgcacccgcagccggcgacggccaggccgcgcgcctcgccctcatcgagtccaacccggtactggcgaacgccgaacggctgtcgctggacgacgcccgcgagctgttcggggcgaacatcaaggccctggcgaaccaaggcttcgacgtgtgcctgatcgacacggccccgacccttggcgtcggcctggcggccgccctcttcgcggccgactatgtgctgtcccccatcgagcttgaggcgtacagcatccagggcatcaagaagatggtcacgaccattgcgaacgtgcgccagaagaacgccaagctgcaattccttggcatggtgcccagcaaggtcgatgcgcggaatccgcgccacgcgcgccaccaagccgagctgctggccgcgtaccccaagatgatgattccggccaccgttggcctgcgcagcagcatcgccgatgccctcgcatccggtgtgccggtctggaagatcaagaaaacggccgcgcgcaaggcatcgaaagaggttcgcgccctggctgattacgtgttcacgaagatggagatttcccaatgactgcggctcaagccaagaccaccaagaaaaacaccgctgcggccgctcaggaagccgcaggcgcggcgcagccgtccggcctggggttggatagcatcggcgacctgtcgagcctcctggacgctcctgcggcgtctcagggcggttccggccctatcgagctggacctggacctgatcgacgaagatccgcatcagccgcggacggccgacaaccccggcttttccccggagagcatcgcggaaatcggtgccacgatcaaagagcgcggggtgaagtcacccatttcggtgcgcgagaaccaggagcagccgggccgctatatcatcaatcacggcgcccgccgctaccgtggctcgaagtgggccggcaagaagtccatcccggcgttcatcgacaacgactacaacgaagccgaccaggttatcgagaacctgcaacgcaacgagctgaccccgcgcgaaattgccgacttcattggccgcgagctggcgaagggcaagaagaaaggcgatatcgccaaggaaatcggcaagtcgccggcgttcatcacccagcacgtcacgctgctggacctgccggagaagatcgccgatgcgttcaacaccggccgcgtgcgcgacgtgaccgtggtgaacgagctggtgacggccttcaagaagcgcccggaggaagtcgaggcgtggcttgacgacgacacccaggaaatcacgcgcggcacggtcaagctgctgcgcgagttcctggacgagaagggccgcgatcccaacaccgtcgatgccttcaacggccagactgatgccgagcgtgacgcggaggccggcgacggccaggacggcgaggacggcgaccaggacggtaaggacgccaaggaaaagggcgcgaaggagccggacccggacaagctgaaaaaggccatcgtccaggtcgagcacgacgagcgccctgcccgccttatcctcaaccgtcggccgccggcggaaggctatgcctggttgaagtacgaggacgacggccaggagttcgaggcgaaccttgccgacgtgaaactggtcgcgctcatcgagggctgatccccaaagacagcggcgcgggccacccgcgccgcacagacaacggttccgctacaaggaggaccgaagaatgaatccgatgctgttctacatcgcgggaggcgtaggcgcggcgttgctgctggtttccgcgatcatgctgttcaagctgcgcgagccgaagaaggaacaccgaccgcagcgcaaggcggcggccccgacgccgcagccggtcgataacgagctgctgcgcacctttcgccggccgtcgcaggccagccaacccgagccatccacgacgccgccggcgcggcgcactgccccgccgagcagcgaacaatccagagggaatgacggcgatttcgtcacgtcggccctggtggccggggcgaccaacagcaccatgctgggctacctggccggcggctcgctgaccggggccatgctgggcgatgcgctgcggccggatacgccgtctgcggcgttcgcggacccctcgccgtgcttcggcagcagcgacacggacagcggctggaccgataccggcagctcttgcgatttcagttcgtccgacaccgatacgaacaactggtgagggcggaccatgactgacgaacaaaagaaacggctcctgatgttgcaagctatccggcgcagcatccaggcaatgcgcaggggtgtttcggggccggatagtttcaagggctggttgaccggcatcggcatcatcgcggcggggttcctggttggcgagctgctgccatcccctgcccccggcgtcggcctggttgtgccaggggcctgcattgccggcttcgtcgtcggctgctggctcaacaggaaaggccgctcatggccgacagccatttacgaccaattggcccgttaccagccgctcaacgagcgggcgtaccgcgacctgcaagagacggtgaaggaacgcggcctcgactgcgatgcggtcatggagtggacctacatcgagcaggccgagttcatgcccctggtgcccaccagggaggacctagcgcgcgacaagttcctgaccgcgacgcgggccgatagggccgaggacgatgcgcgtgcgcgcttcgtcgtgctccatcccaagaagcgcggccccgacgcatgaagaagcccgacgcccgctaatccccttcccgctgaccctttgcccccgccgaccgtgcggggctttttttgcctgcccttcagccgctaaaaaacctgccgttaagtcgagaactgttcagctaaactcttgcgctgataaggtaggtaagagtattattattcttaccaattaccggagccaacatggaactgaacaaagagacgcgcgaccgcatttttgcggctgcggacgagctgttcgagcaaggcgaccgggagaacttcccgaccgtggatgcagtgcgtaaggccgcccgcgtcaacatgaacgacgccagcgccggcatgcgcgaatggcgacgccagcgcacggcgcaggccgccccgctggcagtccaggtgccggacgcggtgcagcaggccggcaaccaggccgtggccgccctctggcaagccgcccaggcccttgccaatgaatcgttgcaggcagcgcaagccggctgggatcgtgagcgcaacgagttggaagccgtgcgcggggagctggccgacgccttcgaggcgcaggcccgcgagctggaagaagcccaggcgcgcgttacattgctagagcagcaggccgccgaggcggccgagctggccgcacgccagcggcaagccctggccgaagcacgcaccgccctggcaggagccgagcagcgggccgcgctggcgacgcagcgggccgacgaggtggagcgtcgagcgcaggagctgcgcgccgagctggactacgctcaccaggacgcccgcgcattcaaagaagagagccgcaagaccctggacgcggccaaccaggaaatgcaggcgcttcgcggcgagcgcgacgccaccaggcgcgaagcggagagtttgcgcacggagttggcagcggtgaaagcgaaggcgcaggccgacgccgaggcccaccaggagcaaaggaagttggcggcgcaagaggcggccaggcaggccgagcgctttacgacggtgcaagccgagcgtgacgaagcgcggcaagaggcaaaggcagcccaagaagaggccgctatgttgaggggtcggctagacgcggaaacgagtgggaggaaacacaaagcgggaggaaagtaactgataaatcgaacgcagttcactaaaatagatggaacaaccttgacgcgcccggctctagggaaagccggcctcgaactgccgaggtcggcttttttttagccggcaagcgaccaggacacgtttaacaccagaggcaaccgtcaggagtcacccaatgaaacaccgcctcctggtcatgaatgggcaaagaattgtccagaccgagaaccaaggcgcatggacgaaccagaaggtagataaagccggggccctgaaacctggcatttacaacatctatatggcccaaaaggccgataagtcgcagcgccacgacggcagcatcgtccacgcagatagcggcagcatttaccaacaggtggggaagaactttgtaatgcacgcccggtcagatttcgataaagtacctgaaatcgggagtgcgaaaagcatcacctatgacgcaagtggcaaggcacaggtaagtgccgaaagcgtcaagttgagtcgcgggcgcactcgttagagttttagcggctaaaaagggaggcgtcttgagcagctacagcagagccgagcgcgcaccgtggggagacttcccgaaggtggttcgcaacggcgaccttggttctttgaccaacgagcctgaataccaggctgcgaagcagggcgacgcggaagcggcgcttaatttggtcgagcgcctgatttcggacgacactgttgcccagctcaagacgctgatcggcgacgacaagccccgcatcgttccagtcctcgccgtcgaggcggcggggaacaacaagattccggccatgatggcggtcgttctggccgaccgccttggccttgaggtcgaaacggacattgtgcagcgggagaaggtcgcccgaaccggagccggttcagatcatcgcctggcgttcaacccgactttcgagggggaggtgatccccggccagaagtacatcgttgtcgatgacacgctgacgatgggcggcaccattgcctcattacgcggctacatcgagaacaacggcggcaaggtcatggcggcgtccgtcatgaccgcccatgaaggcgcgcttgacctggcggtcaagccgaagatgcttgcgggcatcaatgagaaacacggtccagcaatggacgcattttggaaggaaacctttggctatggcatcgaccgactcacccaaggagaagccggacacctccgcgctgccccgtccgttgacgcaatccgagatcgcatcgctgcggctcgaaatgaagcagtcaatcgagtgggggcaagccgaactgcgacgacggcgcgagcagggcaacagcagtccccggcagtaaagcagtccagcggcaacagcggcgaggatttgctacaggcggcccaggaggccgagacggaacagcaggccctcttagaatccgcgcccatcgagcagacctaccagcagacccttgcgctctacgtgcaggcaaagcatgaccaggtggagcgcatcgaggaccgcctagaacagctcgtagaccgtcagcaggcgcgtttgcagcagctacagtccaatgcccccggcttgctgtccctgccgcgtacaaaggccgcctggcagcagcagcaggcccaacagcaagcccgcttgcagaccctgcacacgcggctggacatggtgcgcgaaatcaaggaaggcatgggcattcacgcgcccaagatcgaggaactggcgacgcgcaagatgcgcgcggagcatcccgagctggccggcgactgggattcgatgcgtgaagcagcccgacggcaccaggccctgatgcgcaagcaggagcaggagaagaaacaggcccaggagcgcgagcgcgggcgcagtcagagcttgggcctgtcaaacaagcccagctaacgcaaaaacaaagcccggcaacgccgggctttttcatctgcgcctctgcgattcataacgaggcccacaccaccagggcggccgcgaacaacaccatgccgccggcgatcatgttcatcatcgccacgcgccgcgcgtccgcgaccttggccgcgagctggcggccaaggccgtcgtcgatttccctgcggatcgcttcggccgcctgcgcggcgctgtccttcattaccttcgccattgcgtccttgctggccgccagggccgcgttcagcatccgctccgctttggccttggcgtcctcgccccaacgatgggcgatcccttccagctcttccttgaacgcggcaaggatttcctcttgcttggccgcactgtcggccatgagccgggcgttgatggtatgcaggatcagcaccgggtcgtcgcggccgacggcgatgccgtgcttggccgcaatctcccggatcagctcttcaatctggtcgctcatagcacggccgccgcgtcgagctgttcaaacaggccgcgccgcacgatcttgaggcgttgccgcgtcatgatcgtgagcgattcatcggccagcgcctggtcgaacgtcagccgctcttgcagcatgtcgctgaaatcgcggccgtaggtttcttccttgagggccggaatctggatgatggacgacacgcgggccttgttggccgtgtacgccttcatctgctcaaagctcttgccctcatgctcgataggcccccaatacgggttcagccagaccacgaaaagcgcttcggccgggaactggctggcgagctgggcgaagccgctcaccgtgtccaggagagcctggccgccggtgacgacggtatggatgaccagctcatgccccatttcttgcagcagagccggcacctggttgctgatgaggtaatgcgacagaggcacgaacgagctggcaccgttgtcgatcaccacgtcatccttggtcggcgcaatcagctcgaccagggtgtcgaagttgcgcgagttaatttcgtcgccggccatgatgttcagccggcggacgttcagggccttgtagccctcgaacgtcgcgttcaccgggtcggtgtcgatgcacaagggtgtctgccccttgtccatcttgtactgcgcaatgatcgcggcgatggccgacttgccgaccccgcccttgccctgcaaaaccatgtgaattttcgccattacagtagatcctttttgtccggtgttgggttgaaggtgaagccggtcggggccgcagcgggggccggcttttcagccttgcccccctgcttcggccgccgtggctccggcgtcttgggtgccggcgcgggttccgcagccttggcctgcggtgcgggcacatcggcgggcttggccttgatgtgccgcctggcgtgcgagcggaacgtctcgtaggagaacttgaccttccccgtttcccgcatgtgctcccaaatggtgacgagcgcatagccggacgctaacgccgcctcgacatccgccctcaccgccaggaacgcaaccgcagcctcatcacgccggcgcttcttggccgcgcgggattcaacccactcggccagctcgtcggtgtagctctttggcatcgtctctcgcctgtcccctcagttcagtaatttcctgcatttgcctgtttccagtcggtagatattccacaaaacagcagggaagcagcgcttttccgctgcataaccctgcttcggggtcattatagcgattttttcggtatatccatcctttttcgcacgatatacaggattttgccaaagggttcgtgtagactttccttggtgtatccaacggcgtcagccgggcaggataggtgaagtaggcccacccgcgagcgggtgttccttcttcactgtcccttattcgcacctggcggtgctcaacgggaatcctgctctgcgaggctggccggctaccgccggcgtaacagatgagggcaagcggatggctgatgaaaccaagccaaccaggaagggcagcccacctatcaaggtgtactgccttccagacgaacgaagagcgattgaggaaaaggcggcggcggccggcatgagcctgtcggcctacctgctggccgtcggccagggctacaaaatcacgggcgtcgtggactatgagcacgtccgcgagctggcccgcatcaatggcgacctgggccgcctgggcggcctgctgaaactctggctcaccgacgacccgcgcacggcgcggttcggtgatgccacgatcctcgccctgctggcgaagatcgaagagaagcaggacgagcttggcaaggtcatgatgggcgtggtccgcccgagggcagagccatgacttttttagccgctaaaacggccggggggtgcgcgtgattgccaagcacgtccccatgcgctccatcaagaagagcgacttcgcggagctggtgaagtacatcaccgacgagcaaggcaagaccgagcgctcttcttcaatcgctgccgtcagacggtcagggaacgccgacaggccccgctccgcgtagttcggagcaggacgccgcacggcgtccacatggatcatccacccacttcccaggcccgcgagggcctggttgatgcgggcggacactacttcgcgctgctggtcggtgctgcttgcgttgtcatcgcccttgtacagccaggcagccataaagctgccgttcttgcccacgattacgccgtcatcgacgacagcggcgtagttgagcagatcggccaggccggcgtccttggaacgatgctttttcagtttcagttcggcatcgaccgcgcggatgcgggcaaagaggatgaacaacagaagcgcgccgaggcccgcgattgcaatcgcaattgcttggatcatcggtattgcttcccttggctattggtgttctcgcggaacggggtcgagcgggccgggtaatacggcttgtaccggcggtgacgcaggtacacgaaccgcatcttcggatcggccttcgccatgattcggaacgcatagagcgccccgaaccacaggatcagaccgaccacggtggcccgcagctcttgggcgctgaaaatcagcgcaaacgccatcaggcccgagaacatcaccagttcacgatcaccacccatgaacaggttttctcggttgcctgcgcgacggatggggatcgtgcgcagagccatgattaggcgagccgtccagccgctaccgcacgcacggcatccgccgccgcgacttgcacctggtgcagcgccccgttgccgagggccgcgatttcggcaccacgaccgaagaaggtgctcatcacgttctgcgcgccgaccagcagcgccatcaccagaaccaggaagatcagggttcggaagaaggcgttgagttcgccgccgaagatcagcacgccgccggcgacgacgatgccgatgatggacagcgcgaaggccaccgggccggttacggagttgcgcaggttcgtcagccagctctcatatggcaagctgccgccggtgccttccgaggccatcgccggatgcgcggataacgcgagagcgagaacgaagaacacggcaaggtagaacaaaatgccgcgattcatggtcagacggaacggaacagccgttgtcattggaaatactccttacagggttttggtgatgtactggccgttctcgtaaccaagaacttcgagaatttcttgcactcgacggccgctaggggtcctggcgatatggacgaccacatgaaccgcctcgccaatcagcggctcaatgggtttcggtgaatccgggtgcatgctgataagcatggcgagccggctcaggcccgctttggggttgtttgcgtgcagggtggcggcacctccttcatgcccggtgttccaggccatcaacagatcaagggcttcggggccacgtacctcaccgaccaggatgcggtcggggcgcatacgcagcgttgtcttgagcagcagcgtcatcgagacgtcgatgctggtgtggtattggacggcgttctctgcggcgcactggatttcgccggtgtcctcgatgatgacgacgcgctcagacgggttgaaggcgaccatttcattgatgatcgcgttgacgagcgtggtcttgcccgagccagtaccgccaatgacgaggatgtttcgatgcgccgcgacggcgcttttaatgacctcgtattgctcgcgggtcatgatgcccgcctcgacgtactgttccagcgtgaagatggcgaccgcgcgcttgcggatcgcaaaggttggcgcggccacgaccggcggcaattggccggcaaagcggctgccatccaaggggaactcgccttccaggatgggcgaatgccgcgtgacctctttgccgtggaatccggccaccgtttctataatcgcctgcgactggctgggccgcatgtcgcagatgtaccgcatcggctcgccaaggcgttcgtgccacaccttgccgtccgcgttgagcatgacttcaacggttttcgggtcgttgagcgcggccaacaggtccgcacccatgtcgcgttccagcttgcgcttggcccgctccttgatggtctgaaactcttctttcccgctcacttttcagtaacccctacgcaacaaatcattagcaacattatcgcacaggcaaacgatataccgaaagtgtttagcctgcaagacaaacagctaatcgaaccgcacgacgtaggggttctgatagaaaacaactgtcaaagcgcacccgcccgatgccattcgcggcacggcttccgttgaggatgtcgatatgatgcgcgagccgacggcccgcagagaaggggccgttttagcggctaaagaaggaagtgcaagccctaacccttggcgtcagagccttccacgcagcttttttcgggtgtcgtcgccccatttctttacgataaacgccttatgtgacggcaaaaccacactgatgcgttcgtatccgggcggcacgctgctcttgaaaggatgacccgcaatctccgcgagtgcctcgcggtcaaggtcggtggactccaggagaagaggtaggggagtttccagggcgtcggcaatggcctccatcaccttcaacgaggggttggccttaccgttggttaagtctgataaaaacgaaattgaaacccctgccctctccgacagctcatgtttcgtcatgccccgctcatcgagcagacgaaggatgttggtgaaaaatatctggttgtacacagcggaagccgcccctcgcacctttggtcgcggcccgcaaaattttagccgctaaagttcttgacagcggaaccaatgtttagctaaactagagtctcctttctcaaggagactttcgatatgagccataatcagttccagtttatcggtaatcttacccgtgacaccgaggtacgtcatggcaattctaacaagccgcaagcaattttcgatatagcggttaatgaagagtggcgcaacgatgccggcgacaagcaggagcgcaccgacttcttccgcatcaagtgttttggctctcaggccgaggcccacggcaagtatttgggcaaggggtcgctggtattcgtgcagggcaagattcggaataccaagtacgagaaggacggccagacggtctacgggaccgacttcattgccgataaggtggattatctggacaccaaggcaccaggcgggtcaaatcaggaataagggcacattgccccggcgtgagtcggggcaatcccgcaaggagggtgaatgaatcggacgtttgaccggaaggcatacaggcaagaactgatcgacgcggggttttccgccgaggatgccgaaaccatcgcaagccgcaccgtcatgcgtgcgccccgcgaaaccttccagtccgtcggctcgatggtccagcaagctacggccaagatcgagcgcgacagcgtgcaactggctccccctgccctgcccgcgccatcggccgccgtggagcgttcgcgtcgtctcgaacaggaggcggcaggtttggcgaagtcgatgaccatcgacacgcgaggaactatgacgaccaagaagcgaaaaaccgccggcgaggacctggcaaaacaggtcagcgaggccaagcaggccgcgttgctgaaacacacgaagcagcagatcaaggaaatgcagctttccttgttcgatattgcgccgtggccggacacgatgcgagcgatgccaaacgacacggcccgctctgccctgttcaccacgcgcaacaagaaaatcccgcgcgaggcgctgcaaaacaaggtcattttccacgtcaacaaggacgtgaagatcacctacaccggcgtcgagctgcgggccgacgatgacgaactggtgtggcagcaggtgttggagtacgcgaagcgcacccctatcggcgagccgatcaccttcacgttctacgagctttgccaggacctgggctggtcgatcaatggccggtattacacgaaggccgaggaatgcctgtcgcgcctacaggcgacggcgatgggcttcacgtccgaccgcgttgggcacctggaatcggtgtcgctgctgcaccgcttccgcgtcctggaccgtggcaagaaaacgtcccgttgccaggtcctgatcgacgaggaaatcgtcgtgctgtttgctggcgaccactacacgaaattcatatgggagaagtaccgcaagctgtcgccgacggcccgacggatgttcgactatttcagctcgcaccgggagccgtacccgctcaagctggaaaccttccgcctcatgtgcggatcggattccacccgcgtgaagaagtggcgcgagcaggtcggcgaagcctgcgaagagttgcgaggcagcggcctggtggaacacgcctgggtcaatgatgacctggtgcattgcaaacgctagggccttgtggggtcagttccggctgggggttcagcagccagcgctttactggcatttcaggaacaagcgggcactgctcgacgcacttgcttcgctcagtatcgctcgggacgcacggcgcgctctacgaactgccgataaacagaggattaaaattgacaattgtgattaaggctcagattcgacggcttggagcggccgacgtgcaggatttccgcgagatccgattgtcggccctgaagaaagctccagagatgttcgggtccgtttacgagcacgaggagaaaaagcccatggaggcgttcgctgaacggttgcgagatgccgtggcattcggcgcctacatcgacggcgagatcattgggctgtcggtcttcaaacaggaggacggccccaaggacgctcacaaggcgcatctgtccggcgttttcgtggagcccgaacagcgaggccgaggggtcgccggtatgctgctgcgggcgttgccggcgggtttattgctcgtgatgatcgtccgacagattccaacgggaatctggtggatgcgcatcttcatcctcggcgcacttaatatttcgctattctggagcttgttgtttatttcggtctaccgcctgccgggcggggtcgcggcgacggtaggcgctgtgcagccgctgatggtcgtgttcatctctgccgctctgctaggtagcccgatacgattgatggcggtcctgggggctatttgcggaactgcgggcgtggcgctgttggtgttgacaccaaacgcagcgctagatcctgtcggcgtcgcagcgggcctggcgggggcggtttccatggcgttcggaaccgtgctgacccgcaagtggcaacctcccgtgcctctgctcacctttaccgcctggcaactggcggccggaggacttctgctcgttccagtagctttagtgtttgatccgccaatcccgatgcctacaggaaccaatgttctcggcctggcgtggctcggcctgatcggagcgggtttaacctacttcctttggttccgggggatctcgcgactcgaacctacagttgtttccttactgggctttctcagcccggggaccgccgtgttgctaggatggttgttcttggatcagacgctgagtgcgcttcaaatcatcggcgtcctgctcgtgatcgggagtatctggctgggccaacgttccaaccgcactcctagattgcgcgtcccccttggtcaaattgggtatacccatttgggcctagtctagccggcatggcgcattacagcaatacgcaatttaaatgcgcctagcgcattttcccgaccttaatgcgcctcgcgctgtagcctcacgcccacatatgtgctaatgtggttacgtgtattttatggaggttatccaatgagccgcctgacaatcgacatgacggaccagcagcaccagagcctgaaagccctggccgccttgcagggcaagaccattaagcaatacgccctcgaacgtctgttccccggtgacgctgatgccgatcaggcatggcaggaactgaaaaccatgctggggaaccgcatcaacgatgggcttgccggcaaggtgtccaccaagagcgtcggcgaaattcttgatgaagaactcagcggggatcgcgcttgacggcctacatcctcacggctgaggccgaagccgatctacgcggcatcatccgctacacgcgccgggagtggggcgcggcgcaggtgcgccgctatatcgctaagctggaacagggcatagccaggcttgccgccggcgaaggcccgtttaaggacatgagcgaactctttcccgcgctgcggatggcccgctgcgaacaccactacgttttttgcctgccgcgtgcgggcgaacccgcgttggtcgtggcgatcctgcatgagcgcatggacctcatgacgcgacttgccgacaggctcaagggctgatttcagccgctaaaaatcgcgccactcacaacgtcctgatggcgtactaagctgggcctaggaaatatcagccgcttgtgtgttcaattcttctctgtttcacttgaaacaaattgaatagatattcccgctttcaaagccatttacaaatcctctcgtgcagcctaacgccattggcgtggaacaagcgttggcacgaggaagtaagtgcgatgaacggaaggtattcaccgacgcggcaggattttaagacaggcgcgaagccttggtctatattagcccttatcgttgccgcaatgattttcgcgttcatggcggttgcgtcctggcaggacaatgggactacccaggcaatccttagccaaatacgatcgattaacgctgacagcgcctcactgcagcgcgatgtactccgcgctcacacgggcaccgtggcgaactaccgccccattatctccaggctgggagctctgcggaagaatctggaagatttgaagcaattatttaggcaatctcatattgtaagtgagagcaatgctgctcaactgctacgccggctagaagtgtctctaaattcggctgacgcggcggtcgccgcctttggtgcgcaaaatgtccgcctgcaagattcgctggccagtttcactcgtgctttaagcaatcttccaggaaaggcctcaggcgatcagactttagaaaaaccaacagaattggctagcatgatgctccaatttcttcggcaaccaagcccggctatttcattcgagatcagccttgaactagagaggctccaaaaacaacgcggtcttgatgaagctcccgtgcgcatactttcgcgtgaaggtcccattatcttatcgcttttgccacaggtgaacgatctggtgaacatgattcagacgtctgacaccgcagaaattgcggaaatgttgcagcgtgagtgtttggaggtctatagcttgaaaaatgtggaggagcggagcgcacgtatctttcttgggtccgcttcagtgggtctttgcctgtacatcatcaccttagtctataggctacgcaaaaaaaccgattggttagcgcggcgtttagattacgaagagctaatcaaagagatcggagtatgttttgaaggtgaggcggccactacgtcgtccgcgcaagctgcacttggtattattcagcgcttctttgatgccgatacgtgcgcgttagctctagtggaccatgaccgtaggtgggctgtcgaaacattcggtgcgaagcacccaaaacccgtgtgggacgacagggtgctacgcgaaatagtctctcgtaccaaagcgaacgaacgggcgacggtattccgcatcgtatcgacgcaaaaaatcgtacatttgcctcccgaaattccaggtctttcgatactactggctcacaaatccacagataaactaattgcggtttgttcactgggttaccaaagctatcgccctcgaccttgccaaggcgaaattcagcttcttgaactcgccaccgcctgcctctgtcactatatcgatgttcggcgtaagcagaccgaatgcgacgttttggccagacgattggagcatgcgcaacgccttgaggcagttggtacacttgccggcggaatagcacatgaatttaataacattttggggtcaatcctcgggcacgcagaattggcccaaaactcggtgtctcgaacatctgtcacccgaagatacattgactatatcatttcgtcaggcgacagagccatgctcattatcgatcagatcttgacgctgagccgaaaacaagagcgcgtgatcaagccatttagtgtctcagagcttgtgaccgaaatcgctcccttgctacgtatggctcttcccccaaccatcgagcttagtttcagatttgatcaaatgcagagcgtgatcgaaggaagcccgcttgaacttcaacaggtactaattaacctctgcaagaatgcttcccaagccatgactgcaaatggtcaaatcgacatcttcgtcggccaagcttatttaccagctaagaaaattctggcgcatggtgttatgccacctggcgactatgttctactatctgtcagcgacaatggtggaggcatttcagaggctgtgctaccctacatttttgaacccttctttacgacacgtgctcgcaacggtggaacgggtctcggcctcgcttctgtgcatggtcatatcagcgcgtttgcaggttacatcgacgttagttcaactgttgggcatgggacgcgctttgacatttatctccctccgtcttctaaggagcccgtcaatcccgacagctttttcggccgcaataaggcaccgcgtggaaacggggagattgtggcacttgttgagcccgatgacctcctgcgggaggcgtatgaagacaagatcgccgctctgggatatgagccggtcggttttcgtacctttagtgaaattcgcgattggatttcaaaaggcaatgaagccgatctggtcatggtcgaccaagcgtctcttcctgaagatcaaagtcctaattccgtggatttagtgctcaagaccgcctccatcatcattggcggaaatgatctcaaaatgcccctttcaagggagaatgcgaccagggacctttatctgccgaagccgatatcgtccagaactatggcgcatgcaatcctaaccaaaatcaagacgtagagttgcgacgtatcaggactgggcaatcgcggccgccgggcttacgtgtcttttgtaacaaattgcgacgcagttgatatccacttgaaacattagtccgaaattatcgagatctccgctgataaggtatcgaaatggcgataaaattggtattgatactcgtattcacactctttcccgcggcagacgctgcatatgcgaatgaccgcgccaacggtttcatgtggtcaaacgggggcgaaactggagtgaggcttcctcttcgggtgttcaatgccaagccagccaagaacacggtggcgatcatttattccggagacgctggatggcaaaatatcgatgaggcgattggtacctatctgcagacggaagggattcctgtcattggcgtcagttcacttcggtatttctggtcggagcggtccccaagcgaaactgctaaggatcttggtcacataatcgatgtctacaccaagcatttcggtgtgcagaatgttttacttgtaggatattctttcggcgcggacgtcatgccggcaagcttcaataggcttacgcttgagcaaaaaaatcgggttaagcaaatctctctcttggcattgtcacatcaagtcgactatgtcgtctcatttaggggctggctccaactcgaaacggaaggtaagggcggcaatcctctggatgatctcagatccattgaccctgcaatcgtccaatgcatgtacgggcgcgaagaccgtaataatgcttgcccatctctccgacagaccggcgcagaggtgataggcttcagcggaggccatcactttgataatgatttcaaaaaactgtctacgcgcgtcgtctcaggcctcgtggcacgcctaagtcatcagtaatctttagttcctgcaccgcgggacccgcgaggtttctcgcttcaattgaaatcataaagaagcaattgaaaattttcgagtaaccgaccctcccgataatcttcaacataaaacaacgcacttcttccaacgggagaggcggtgttagttgcgagctaaggagataaggtatgcttaagagatcggggtcgctttctcttgccttgatggtctccttctgttcgtcgagccttgccacgccactctcatctgctgagtttgaccatgttgctcgcaagtgtgccccatcagttgcgacatctacgcttgcggcgatagctaaggtggagagtcgctttgatcctttagcgattcatgacaacacgaccggcgaaacgcttcactggcaagatcacagccaagcaacccaagtcgtcaggcaccgtctcgatgcacggcattcgctggatgttggcctcatgcaaataaactctcgaaatttttctatgctcggtctgacacctgacggtgcgctccaggcgtgcacatcattatctgccgctgcaaacatgctgaaaagtcgttatgcaggcggcgaaacgattgacgagaagcaatttgcgcttcgtcgggcgatctccgcttacaacaccggtaatttcatcggcggttttgcaaacggctacgtgcgaaaagttgaaacagctgctcaatcgctggtgcccgcgttaatcgagcctccaaaagacgatcacgaggcgctaaaatccgaagagacgtgggatgtttgggggtcatatcagcgccgctcgcaggaggatggcgctggcggtttaatcgctccgccaccgccacaccaggacaacggcaaatccgcagacgacaatcaagtcttattcgacttatactaaggaggtgcgcattgatgcgatgctttgagagataccgtttacatctaaatcgcctctcgctctcgaatgcgatgatgcgcgtgatatcgagctgcgccccaagcttgtgcggtgcaattgcatggagcatttcctcatccggacccgccgcagcgcaatctgcgggtggcggcactgaccccgccacaatggttaacaatatatgcacgtttatccttggtccgttcggccagtcactcgctgttctcggcattgtcgctatcgggatctcctggatgttcgggcgggcttcgcttgggctggttgccggcgtcgtcggcggcattgttatcatgtttggggcgagcttcctcggccaaacgctcactggcggtagttgatggctgatcgtttggaagaatcgaccctttacctcgcagccacacggcccgcattgtttcttggggtgccactgacattggcagggttattcatgatgttcgccggctttgtcatcgttatcgttcagaacccgctctacgaagtcgttctcgtgccgttatggtttgcagcccggctcatcgtggagcgagactacaatgcggcgagcgtcgtcctgctatttttgcggaccgcgggaagaagcattgatagtgcagtttgggggggcgctactgttagcccaaatccaattagggttcccccacgagggagaggaatggtgtgatgctcggcgcgagtggaacgaccgaaagatccggtgagatctatctcccttatattggccacctcagcgaccatatcgtccttcttgaagacggatcgatcatgaccattgcgagaattgatggcgttgcattcgagcttgaggaaactgaaatgcgcaatgcgcgttgtcgtgcgttcaacacgctgttgcgcaatatcgctgatgatcatgtgtcaatatatgctcacctcgtacgtcatgccgacgtgccatcatcggcgccgcgacacttccgtagtgttttcgccgctagcctgaacgaagcttttgaacagcgcgtgctctccggccaactcctccgcaatgaacacttccttacgttgattgtctacccacaggcggctttagggaaggtaaagaggaggttcaccaagctaagcggaaaaagggaaaacgatctcacgggccagatcaggaacatggaagatctttggcatgttgtcgctggctctcttaaagcgtatggcctgcatcgtcttggcatccgcgagaagcagggtgtgctcttcaccgaaattggcgaagcgctacggttgatcatgactggtcggttcacaccggttccggtcgtcagcggctcactcggcgcttcgatttataccgacagagtcatttgcggcaagcgaggactcgagatcagaacgccaaaagacagttacgttggatccatctattcgtttcgcgaataccctgcaaaaacacggccgggcatgctcaacgcgctgctatccctcgattttccacttgttctcacgcagagtttttcgttcctgactcgcccgcaagcgcacgcgaaacttagcctcaaatcgagccagatgctgagttccggcgataaagccgtgactcaaatcggcaaattatccgaggctgaggacgcacttgcgagcaacgaattcgttatgggctcacatcatttgagcctttgcgtctatgcagacgatctcaatagtcttggggacaggggcgcgcgggctcggacacgaatggcggatgcaggtgccgtggttgtccaagaaggtattggtatggaagcggcctattggtcccaattgccggggaattttaagtggcgcacacgccctggcgcaatcacttcacgcaatttcgcagggtttgtctctttcgaaaactttccagagggcgccagctcaggccactggggcaacgcgattgcccgatttcgtaccaatggcggaacgcctttcgactatatcccgcatgagcacgatgttggcatgacggcaatattcgggcctatcgggaggggtaagacgacgctcatgatgtttgttctagccatgctcgaacagagcatggtcgaccgtgcaggtacggtcgtgttctttgacaaggaccggggtggcgaattgctggttcgcgccacaggaggaacatatttggcacttcacagaggcacacccagcgggttggcgccgttgcgtggcctagaaaacacagcagcctcacacgattttctgcgcgaatggatcgtggctctcatcgagagtgatggtcggggtgggatttctccggaagagaaccgccgtctggtccgtggtatccatcgtcagctctcgtttgatccacaaatgcgttcaatcgcggggttacgtgaatttttgttgcatgggcccgccgaaggcgcaggagcgcggctccaacgctggtgccggggccatgcgcttggctgggcatttgacggcgaagttgacgaagtaaagttagatccgtcgattaccggcttcgacatgacgcatcttctcgaatacgaggaagtatgcgctcccgctgcagcatatctcctgcatcggattggagccatgatcgacggccgccgttttgtgatgagctgcgatgagtttcgcgcctatttgttaaaccctaaattttcgactgtcgtcgacaaattcctcctgaccgttcgaaaaaacaacgggatgctaatactggcaacgcagcaaccagagcatgttctggaatcgccgctaggagccagcttggttgcgcaatgtatgacgaagattttctatccatcaccaaccgcagatcgatcggcttatgtcgatggactgaaatgtaccgaaaaggaatttcaggcgatccgtgaagacatgacggtcggcagccgtaagtttcttcttaaacgagaaagtggaagcgtcatctgcgaatttgatctgcgggatatgcgtgaatatgtcgccgtgctttcggggcgtgccaacacggtgcgctttgcaactcgactacgcgaggcacaagaaggcaactcatctggctggctcagcgaattcatggcccgtcaccacgaggcagaagattgataaggtaggaaacgatgaagacgacgcaacttattgcaacagttttgacctgcagctttctatatattcagcccgcgcgggcgcagtttgttgttagcgacccggcaacggaggctgagacgctcgcgactgcgctcgcgactgcggagaatctcactcagactatagcgatggttacgatgttgacgtcggcctacggcgttactggactactgacttcgctcaaccagaaaaatcagtatccttcgacgaaggacctagacaatgaaatgttttcgccgcgaatgccaatgtcgaccacggcacgtgcgatcaccagcgatacagatcgtgcagtcgtgggtagtgatgctgaagcggacctgttgcgatcgcagatcaccggttccgcaaacagcgctggcattgcggctgacaatctggaaacgatggacaaacgcttgacggcgaatgctgatacgtctgctcagctttcccgatctcgcaatatcatgcaggcaaccgtgaccaatggtttgcttctcaagcagatccatgacgcaatgattcaaaatgtacaggcgacaagcctattaacgatgactaccgcgcaggccggccttcacgaggcggaagaggcggccgctcaacgcaaggagcatcaaaagaccgctgtcatctttggtgccctcccctaaggctgggcgatttgttcatccgcccgcatcctcgccgaatgcgagctcattttatccaacattatgcgacaaaccagtcaagttcaggtccaatcgatgaatttcacgattccggcgccgtttacggccattcatacgatcttcgatgtagccttcacgacaggcttggactcgatgcttgagactatccaggaggcggtgagtgcgccattgatcgcctgtgtcactctttggattattgttcagggtattttagtcatacgcggcgaagtcgatacccgtagcggtatcactcgggtgatcacggtcaccatcgttgttgctctaattgttgggcaggctaactaccaagactatgtggtttccatcttcgaaaagacggtcccaaactttgttcagcagtttagtgtaaccggcttgcctctgcagactgttccggcacagttggatacaatgttcgccgtgacccaggccgtttttcagaaaatcgcatccgaaatcggtccgatgaacgaccaggacatccttgctttccaaggggcacagtgggtcctttacggcacgctctggtctgccttcggagtttacgacgccgttggaattctcacgaaagtgcttctcgcgatcgggcctctgatcctcgtcggatatatttttgatcgcacgcgggacatcgcagctaagtggatcgggcaacttatcacctacggtctcttgcttctcctcttaaacctcgtggcaacgatcgtcatcctaaccgaagcgactgcgctcacccttatgcttggtgtaatcaccttcgccggtacgaccgcggccaagatcattggtctttacgaactcgatatgttttttctgacaggggatgcgctcattgtcgctttgccggcgatcgccggcaacattggaggcagttactggagcggcgcaacccaatctgccagcagcttgtaccgtcgcttcgctcaggttgagcgaggctaggtcgcgcaaaaattcgcctcaatggagaattctatgaagtattgcctgctgtgcctagttgtcgctttgagcggctgccagacaaacgacacattagcgagctgcaaaggcccgatcttcccgctgaatgtggggcgatggcagcctactccgtcagatcttcagctcggcaattcgggtggacgctatgacggggcctgaatatgccatgctagtggcgcgcgaaagccttgccgagcactataaggaagtagaagcctttcaaaccgcgcgagcgaaatcggcgcgacgtctctccaaactcattgcagctgtcgcagctatcgcgattttgggaaatgttgctcaagcgttcgctatagccacaatggtgccgttgagcaggcttgtgcccgtatatctatggatacggccggacggcaccgttgacagcgaggtgtctgtctcgcgattgcctgcaactcaagaggaggccgtcgttaacgcctcattgtgggagtacgttcgcctgcgcgagagttatgatgccgacaccgctcagtacgcctacgacctggtatcgaacttcagtgccccaacagtgcgccaggattaccagcaattcttcaactatcccaatcccagttcgcctcaagtcattcttggcaaacgcggcagggtggaggtcgagcacatcgcttcaaatgatgtaactccaagcacgcagcaaattcgctataaaaggaccctcgtcgttgacggcaaaatgcctgtggtgagtacgtggaccgcgacagttcgctacgaaaaggtgaccagcttgcccggcagattgagactaaccaacccggcaggtctggttgtcacctcctatcagacatcggaagataccgtttcaaacgtaggccacagcgaaccatgatcagaaaagcacttttcattttagcatgtttatttgccgctgcgactggtgcggaggctgaagacactccaatggcgggcaagctagatccgcgcatgcgttatttggcttacaatcccgatcaagtggtgcgcctctcgacggcggttggagctactttggtcgtaacattcgccacgaacgaaacggtgacagcggttgccgtttcaaatagcaaagatctagcagccctaccgcggggaaattatctatttttcaaggcaagccaggtcctcacgcctcagccagtaatcgtgctaaccgcaagcgactccgggatgcgccgttatgttttcagtataagttccaagactctgtcccacctcgataaagagcagcccgatctctattacagcgtccaattcgcctaccccgccgacgatgcggcggctcggcgaagggaggcacaacagaaggctgttgtggacagactacacgcggaagcacaatatcaacggaaagctgagaatttattggatcagcctgtcacagcccttggtgcggcggacagtaattggcactacgtcgcccaaggcgatcgttcgctgttgccactcgaagtcttcgacaatggatttacgacggtattccactttccgggcaatgtacgcataccctccatctacaccatcaatcctgatggcaaggaagctgttgccaactattcagttaaagggagcgatgtcgagatttcttcggtttcccgaggttggcgtctgagggatggccacacagtactatgtatctggaacaccgcttacgatcccgttggccaaaggccgcaaacgggcacggtgaggcccgatgtgaaacgcgtcctgaagggggcgaagggatgaataacgatagtcagcaagcggcacatgaggttgatgcatctggatccctggtctccgacaaacatcgccggcgtctttcggggtctcagaaattgatcgtcggaggtgtcgttctcgcgttatcattaagcctcatttggctaggtgggcgccaaaagaaggtgaatgagaacgcatcgccgtcaactttgatcgcaacaaacaccaagccatttcatccagctccgattgaggtgccgccggatcctccagcggttcaagaggctgttcagcctgctgctcctctaccgccgaggggcgaaccggagcggcatgagccacggccggaagaaacaccgatttttgcatatagcagcggcgatcaaggggtcagcaaacgcgccattcagggcgacacgggccgaagacaagaaggcaagcgtgacgacaactccttgccgaatggcgaagtgtccggcgagaacgatttgtcgatacgtatgaaacccaccgagctgcagcccagcagcgccacgctcttgccgcaccccgattttatggtaacgcaagggacaataattccgtgcatcttgcaaaccgcaatcgacacaaatttggcaggctatgtaaagtgtgtcttgcctcaggatattcgtggaacaacgaacaatatcgtgcttcttgatcgtggcaccaccgttgttggcgaaatacagcgtggcttgcaacagggagatgggcgcgtttttgtgttgtgggatcgcgccgagacacctgaccatgcgatgatctcgttaacatcgccaagcgcggacgaactcggtcgctcaggattgccgggctcggtcgacagccacttctggcagcgttttagcggagctatgctcttgagtgttgttcaaggcgccttccaggcagctagcacctacgccggcagctcgggtggcgggatgagcttcaacagctttcaaaataacggtgagcagacaactgagacagcccttaaggcaaccatcaacataccgccaaccctgaagaagaatcagggtgacaccgtttccattttcgtagcacgggacctcgatttctttggtgtttaccagctccgcctgactggcggcgccacgcgggggaggaaccgccgctcttaatgaattcaaatttccgcttagagataggatacattgtaaatggaagtggatccgcaactacgctttcttctgaagccgattttggaatggctcgatgacccgaagactgaagaaattgcgatcaatcgacctggagaggcatttgtgcgccaagccggcatttttaccaagatgcctttgcccgtctcttatgatgatcttgaagatatcgctattttagcgggcgcgctgagaaagcaggatgtcggaccacgtaaccccctctgcgccactgaacttcctggtggtgaacgactacaaatctgtctgccgccgaccgttccctcgggcaccgtcagcttgaccattcgacggccaagctcgcgtgtttctggtcttaaagaagtctcctcccgttatgatgcttcgaggtggaaccagtggcagacacgaaggaaacgccaaaatcaggatgatgaagctatccttcagcattttgacaacggggatttggaagcgtttctgcacgcatgcgtcgtcagccgactgacgatgttgctatgtggccctaccggaagcggcaagacaacaatgagcaagaccttgatcagcgccatccccccccaggaaaggctaatcaccatagaagatacgctcgaactcgtcattccacacgataatcatgttagactactctactccaagaacggtgctgggctgggtgctgtgagcgccgagcacttgctccaagcaagtctgcgtatgcggccggaccggatattgcttggcgagatgcgcgacgatgcagcatgggcttatctgagtgaagtcgtctcgggacatccgggatcgatttcaacaatacacggcgcgaatccaatccaaggattcaagaaactgttttcccttgtcaaaagtagcgcccaaggtgctagcttggaagatcgcacactgattgacatgctctctacggcgatcgatgtcatcattccattccgtgcctatgaggacgtttatgaagtaggcgagatctggctcgcggcggacgcacgacgccggggcgagaccataggcgatctccttaatcaatagtagctgtaacctcgaagcgtttcacttgtaacaacgattgagaacttttgtcataaaattgaaatacttggttcgcattttcgtcatccgcggtcagccgcaattctgacgaactgcccatttagctggagatgattgtacatccttcacgtgaaaatttctcaagcgctgtgaacaagggttcagattttagattgagaggtgagccgttgaaacacgttcttcttatcgatgacgatgtcgctatgcggcatcttattatcgaataccttacgatccacgccttcaaagtgaccgcggtagccgacagcacccagttcactagagtactctcttccgcgacggtcgatgtcgtggttgttgatctaaatttaggtcgtgaagatgggcttgagatcgttcgaaatctggcggcaaagtctgatattccaatcataattatcagtggcgaccgccttgaggagacggataaagttgttgcactcgagctaggagcaagtgattttatcgctaagccgtttagtacgagagagtttcttgcacgcattcgggttgccttgcgcgtgcgccccaacgttgtccgctccaaagaccgacggtctttttgttttactgactggacacttaatctcaggcaacgtcgcttgatgtccgaagctggcggtgaggtgaaacttacggcaggtgagttcaatcttctcctcgcgtttttagagaaaccccgcgacgttctatcgcgcgagcaacttctcattgccagtcgagtacgcgacgaggaggtttacgacaggagtatagatgttctcattttgcggctgcgccgcaaacttgaggcggatccgtcaagccctcaactgataaaaacagcaagaggtgccggttatttctttgacgcggacgtgcaggtttcgcacggggggacgatggcagcctgagccaattgcatttgattaatttaggtgactgaggacgcggccagcggcctcaaacctacactcaatatttggtgaggggttccgataggtccctcttcaccaattgctcgatggcttctctccagcaaagaatgacgcgagcgcggcggtagccagcttgtggccgaaagctcgagcggtctccaaccccaacggatcaaaatgacttcgagcgacctcgagcaacgcaaccgggaacatgcgtgaggtctgaacgagaacggatttttctgtagttgaagggatcggataacttttcggggccacgcgaaatgatccatctgccagcatgctttcgaaatcgtccaacgcgcgccttaaaatcatttgtagcgacttcgagggactgtattgccgaacgaggttgtcatatgttttcgacacttgaggcgcgggcggtcgcgctgaaagaaaaacctggagctttttcggggacggaggtggactaagggcatccacagttagcttaagttgtcgatcgggactgtaaatgtgatcggcgacgagaggctcacgttgctggtctttctcgtcggctttttcaggcaagtgctggaggtccagcttctggggaacaagtgtcgggttgggatggtggatctcgggtcgagcaccagcaagccgccgtgcttcgccgaccgacaatgcgggcttgcgaattgccatcttcaagcctccaagattttgctgatcagtttcgaaatgaccacgacttcctccatcgcaatccgaagattcctctctatgaggcgcatcgtcggatcagttcccgtgtttagtaatgtaagatgcaacatgccgcgttctttcatcgcggcaaatgcatctctttcatgcatgggagacggtacaactggaaggctctctagcgtctctgacatcctgcgttgcgatgttgtcaatcggccgaccgggacgcgttggcgcaaaacagctgtaggaattgccaaattttcactcaacagcagctcgatgacgtagcggtaggtagatagtgcctcatcgatgtcgagcggcgttagcatggtggggatcagaagcaggtttgagctagcgatgattgtgttgttgagctcgctcgagccgccacgcgtatcggccaacgcataatcaaatccttcgagctcggcattttcataggctgcttcaagaaggggcatttcgtcggcggaatagacttcacagcgaggatcccaggtactgctttgtaaggcgttttctctccatcgcgtcagaggccggttttcgtcggcatcaaagagggccactcgtttaccgtcatttgccaaagcagcgcaaaggcccatgagtgcggtggttttgccagcaccccctttgaaagaacaaaacgtcaaaagttgcatattctgatcccgcctatcctgtgaaaccggagtgcatttgtatttttgttcgtataaatgtttttgtgattatcgatgagtaaaagcgttgttacactatttttatttcacattcgttataagacaattgcaaatgtagcaagtatattcagtattgactgtaaatgtactgttgatttcatattgagcagggctagacttccatccgtctacccgggcacatttcgtgctggagtatccagaccttccgctttctttggaggaagctatgtcaaaacacaccagagccacgtcgagtgagactaccatcaaccagcatcgatccctgaaagttgaagggttcaaggtcgtgagtgcccgtctgcgatcggccgagtatgaaaccttttcctatcaagcgcgcctgctgggactttcggatagtatggcaattcgcgttgcggtgcgccgcatcgggggctttctcgaaatagatgcagacacacgagaaaagatggaagccatacttcagtccatcggaatactctcaagcaatgtatccatgcttctatctgcctacgccgaagaccctcgatcggatctggaggctgtgcgagatgaacgtattgcttttggcgaggctttcgccgccctcgatggactactgcgctccattttgtccgtatcccggcgacggatcgacggtcgctcgttactgaaaggtgccttgtagcacttgaccacgcacctgacgggagaaaattggatgcccgatcgcgctcaagtaatcattcgcattgtgccaggaggtggaaccaagacccttcagcagataatcaatcagctggagtacctgtcccgaaagggaaagctggaactgcagcgttcagcccggcatctcgatattcccgttccgccggatcaaatccgtgagcttgcccaaagctgggttacggaggccgggatttatgacgaaagtcagtcagacgatgacaggcaacaagacttaacaacacacattattgtaagcttccccgcaggtaccgaccaaaccgcagcttatgaagcaagccgggaatgggcagccgagatgtttgggtcaggatacgggggtggccgctataactatctgacagcctaccacgtcgaccgcgatcatccacatttacatgtcgtggtcaatcgtcgggaacttctggggcaggggtggctgaaaatatccaggcgccatccccagctgaattatgacggcttacggaaaaagatggcagagatttcacttcgtcacggcatagtcctggatgcgacttcgcgagcagaaaggggaatagcagagcgaccaatcacatatgctgaatatcgacgccttgagcggatgcaggctcaaaagattcaattcgaagatacagattttgatgagacctcgcctgaggaagatcgtcgggacctcagtcaatcgttcgatccatttcgatcggacgcatctgccggcgaaccggaccgtgcaacccgacatgacaaacaaccgcttgaaccgcacgcccgtttccaggagcccgccggctccagcatcaaagccgacgcacggatccgcgtaccattggagagcgagcggggtgcccaaccatccgcgtccaaaatccctgtaactgggcatttcgggattgagacttcgtatgtcgctgaagccagcgtgcccaaacaaagcggcaattccgatacttctcgcccggtgactgacgttgccatgcacacagtcgagcgccagcagcgatcaaaacgacgtcatgacgaggaggcaggtccgagcggagcaaaccgtaaaagattgaaggccgcgcaagttgattccgaggcaaatgtcggtgagcccgacggtcgcgatgacagcaacaaggcggctgatccggtgtctgcttccatccgtaccgagcaaccggaagcttctccaacgtgtccgcgtgaccgtcacgatggagaattgggagaacgcaaacgtgcaagaggtaatcgtcgcgacgatgggcgcggggggacctagactagtagacaggaaggaccgaataatggcaaatggtcagttcacgatacgctctgctcgcccggcctccgtcggactgacaggcgaacggcgtggagccgcatccgcctctagctctgcactgtccaatgttcaaagagatgttagggataggctgattccaactagctcaccaagattaccaaatgcagccatattgcgtgattcctcgggaagagcgtcgactggtctgcggtacatggcggctactcttcattggtctgcgatcgcgccattatcgctaataaacagcaacgacctggctccggccgcttatgactttgagacgcgaaataacgcaagaaatgtgactgccaaagtcggcagggcagtccctgttcccaagcaaggcgggctcggcaaaacgctcgcacccgtaccccttagtacacgtatatcaagggtcaattccgaccgaagactgcccgctgacgcagaagaccgccctgaaacgcgcgacccccagaaaggacgtggcagtcatggtgcgacgccaaccttacatgaaaagattggaaccgcgtttgctcgaagattgcgaaagcatacgtactatattgtttgcagttgctgccagacccggagcgcgttgacgatgggtgcaaagatttcggtgaagtcatgaactccagcaagacttcgccccagcgtatgaccctgagcatcgtatgttcgctggcagccggtttttgtgcggccagctgctatgtaacgttccgccggggcttcaacggcgaagcgatgatgacgttcgacgttttcgctttttggtatgagaccccgctttacttgggttatgccagcaccgtcttctggcgtggtttatctgttgtcatctttacctcgctgatcgttctttcaagtcagctcatcatatcgctgcgcaatcagaagcatcatgggacagctcgttgggcagaaattggcgaaatgcggcatgctggttatctgcagcgttacagtcgcatcaaggggccgatctttggaaagacatgtggtcccctttggttcggcagttatttgaccaatggcgaacagccacacagtcttgtcgtcgcgccaacgcgtgctggcaaaggcgtcggcatcgtcattccaacgctgttgaccttcaagggctcggtaatcgcccttgacgtcaagggagaattgtttgaactgacgtccagagcacgcaaagcgagcggcgacgcagttttcaagttctcccccctagatcctgagcggaagactcattgttacaatccggtcctggatattgccgcacttccgcccgaacgccagttcactgaaacacgccgtctagctgcgaaccttattacggctaagggaaagggagcagaaggctttattgacggcgcacgtgacctgttcgtcgcgggaatccttacctgcattgagcgtggcacaccaacgattggcgcggtatatgacctatttgcgcagcctggcgaaaagtataagctttttgcgcaactcgcggaggaaagcctaaacaaagaggctcagcgtatcttcgataatatggcgggcaacgacacgaaaattctgacatcgtacacctctgtgctgggcgacggtggactgaacctgtgggctgatccgcttatcaaagcagcgacaagccggtcagacttttccgtttacgatctccggaggaagaagacctgcatttatctttgtgtcagtcccaacgatctggaggtcttggcaccacttatgcgcctgatgtttcagcagctcgtgtcaatcttgcagagatcgctgccaggtgaagacgagtgccatgaagttttatttctcctcgacgaattcaaacacctgggcaagcttgaggccatagagaccgcgatcacaaccatcgccggttacagaggccgctttatgtttattattcaaagtctttcggccttgtcgggcacatacgatgacgcaggaaaacaaaactttctgagcaatactggcgtacaagtatttatggccacggctgatgacgaaactccaacctacatctcaaaagctatcggcgaatatacgtttaaagcgcgttcgacctcttacagtcaagccagaatgttcgaccacaacatccagatttctgatcaaggtgcagcccttttgcgccccgaacaagtgcgcctgctagacgatcagagtgaaatcgttctcatcaaagggcgacctccactcaaattacgaaaggtgcagtattattccgatcgtacgctgaaaggccttttcgaacgccagatgggctctctgcctgagcccgcacccttgatgctttccgactatagcaacgatcaagttcaataccacttggctccgatagcaaattttaatgaggatgctgcaccgcaaaacagaactgtggccgaggaccatggaagtgttaaagtcggtgctgatatccctgaacgcgtgatgggaataaatggtgacgaggaacaagccgatgcgggcgagataccgccggaatcggttgtgcctccagaattgacgctcgctctgaccgctcaacagcaattgttggaccagattattgcacttcagcaaagatcgaggtccgcaccggcatagcctgcgaaatgatcttaatggtgcaattcgtttcaggcggcatgttgcggttcaacaaagtgtacgccagatcccaattggccctttacgaggtgtcggtatgacaggaaagtcgaaagttcacataagaggttcggctgacgcgcttcctgacgttcctggcggaagtactaccgccccttttttaaccgaaccttctcgggatcaggttgatgcctcgtttgaggtccaaaccgactacagccagtctacttccgtgtcgtttacctatgatggtgttggacttggtcctgccgagcgtgcggcttacgagaactggtgcgaaccgggccggcccacttggaaagatcttataatcaaggcacgtgtcgatccgattgacgatgtgacctggctccgagatttagaagaggacaccccctcaaccttcagatacgaagggatgcctctgggcatcggggaacgacaggcctacgaaaattggcaagaggacgctcagccgacatgggaagaccttgttgtcagcgcacgcttgacggaacttggccgtccacacgggattaccggcgagtatacatccctcgcaggatcgaagaatacaagttcaatttcattgaagcgaaagcggagcaacttaattgatgatgagaattcatccggatcgttttcatatgacgggatgaagctcggggaagccgagcgttctgcatatggtgactgggccgaggcggagccacccacgtggaaagatttggtattgagggcacgcgtttcctcgatcaatgactctgcttggctttttgattcacaaacatcttcatcatcatttgaatacaacggtgttcccttgggcgagccggaacggcaggctctcagacaatggcaaggagacgctcagcctacctgggaagatctcgttgttaacgcgcgtatggcagaactttgccatgctggttggattgaaggtcaaaaaggttgctttgaagagcgcggggaggctctgcccgcgtcggaacgcggttcgcaacgccccattggtcaacggacagattcctccgattcttttgtgtatgatggcacaaggctcggagcacctgagcgaactgcttatgaacgctggagtaagagggaacgcccgacttgggaagatctcatcttagatgcacaccaggccaggactgaaagtgacgctgttacgacccaagcgattggtcagtcgtcctcaccggttttcttatatgaaggaaagtcgctcggagacagggaacgaaaggcttacgaaaaatggcggcagccagcccaaccgcgatggcaaaatcttgtagtgaacgctcgtctggcagaaatcgatccctcagcctggattgccgatgagcgcgatccgcttgatgatagcgacgcgcttggtcgcccgtcgtacacaagcttgacggatagatcagacgtccctttagacgatcaatcaatctatcgtcgttccgacctagtaagggagcaggtgccagaatcgtctcaaaggcaattcgcagcatgttcagaatctgaaacgaggcctgtgcaatggtttactgcttctgggtcagatgcaaacaatacggaaaatatcaccgccagcgatcccgtcgatcgcacgggtggagttaagcggctaggctccaaaagcgacagaaccgttacagcttctatccatgacgtgaattccagcacaaggcgactgttgcttaacgaatttggatcggaggctccgcgcccttcgccagaaaagactgttcgcttaagaagcgacaatattggcacctatgggagccggaaaaatgaacgagcgcggctcgcgaccgaaaccggtgcgtatgagtcggagcatattttcgggttcaaggctgtccacgatactgcgagagcgacgaaagagggccggcgtctcgaaaggcccatgcccgcctaccttgaggataaggggcttcatcgccaacatattggcaccgggagaggacggaccaaacttgtcgggcgcggatggccggatgacacaagctatcgctcggatcaaagggcaactctgtcggaccccgttgcgcgctcggaaggcgcgacggcctcaaatgggtatcaattgaaccaattgggttacgcgcaccaactcgctagcgatggcctgcaaagtgaatcgcccgatggtgttgccttgccaattcaagtggcaacaacgagctacaactatacagtgagccgcgatcctgtccttgttccgccggataaaaacgaagcccctcaattgctgcatcttggtccccgtggtcaaaccgaagctgttcttgcccgcgaaacagcattgactggaaaatggccgactctcgagcgtgagcagcaagtgtatcgcgagtttttggccttatatgacgtaaaaaaagatcttgaggccaaatcagtcggcgtaagacggaaaaaaaaagaagttatttctgcgttagaccgaactgcgcgcttgataagcacgtcgccttcgaaagctcgatccaaagcagagactgaaaaagccattgatgagctcgatgatcgacgagtttatgatccgcgtgatcgagctcaagacaaagcgtttaaacgctgataagtcgccaatatagtgatcatttgcagtattcgcatcgatcgctggttgatattctgccgctggtcgaccggctgctcgtcgccaaaaatgctcacagggatacgatggcctcggtcaggccgcgtgcgtcctgtctttccagttcctccctttcagctcgattgtggcatcatttattgcctgctcattgcagttgaaacgcgatatccgtttcaagacccgggt

SEQ ID NO: 31 - DNA, 24624 bp, Artificial Sequence
  Nucleotide sequence of RV019928 construct
cttctacaaaactcacagaaacaatcaaacaaacatacacagcgatttattcacacgaacccgaattacaacggtatatatcctgtcagccaacaccaaaacatcaaaaaaatcgggatcaggatcaggatctgcggccgcatcctgcaggagctcaaacgagcaggaagcaacgagagggtggcgcgcgaccgacgtgcgtacgtagcatgagcctgagtggagacgttggacgtgtatgtatatacctctctgcgtgttaactatgtacgtaagcggcaggcagtgcaataagtgtggctctgtagtatgtacgtgcgggtacgatgctgtaagctactgaggcaagtccataaataaataatgacacgtgcgtgttctataatctcttcgcttcttcatttgtccccttgcggagtttggcatccattgatgccgttacgctgagaacagacacagcagacgaaccaaaagtgagttcttgtatgaaactatgacccttcatcgctaggctcaaacagcaccccgtacgaacacagcaaattagtcatctaactattagcccctacatgtttcagacgatacataaatatagcccatccttagcaattagctattggccctgcccatcccaagcaatgatctcgaagtatttttaatatatagtatttttaatatgtagcttttaaaattagaagataattttgagacaaaaatctccaagtatttttttgggtattttttactgcctccgtttttctttatttctcgtcacctagtttaattttgtgctaatcggctataaacgaaacagagagaaaagttactctaaaagcaactccaacagattagatataaatcttatatcctgcctagagctgttaaaaagatagacaactttagtggattagtgtatgcaacaaactctccaaatttaagtatcccaactacccaacgcatatcgttcccttttcattggcgcacgaactttcacctgctatagccgacgtacatgttcgttttttttgggcggcgcttactttcttccccgttcgttctcagcatcgcaactcaatttgttatggcggagaagcccttgtatcccaggtagtaatgcacagatatgcattattattattcataaaacgaacgctcttcaactggaagagcggttactaccggttcactagctagctgctaatcgagctagttaccctatgaggtgacatgaagcgctcacggttactatgacggttagcttcacgactgttggtggcagtagcgtacgacttagctatagttccggacttacctagctaggttaccagagctggtcaccttcttcatcgctaagaagacactcagtagtccggaccgatatcgctatcaactttgtatagaaaagttgggccagaatggcccggaccgggttaccaagcggccgcaattggatcgggtttacttattttgtgggtatctatacttttattagatttttaatcaggctcctgatttctttttatttcgattgaattcctgaacttgtattattcagtagatcgaataaattataaaaagataaaatcataaaataatattttatcctatcaatcatattaaagcaatgaatatgtaaaattaatcttatctttattttaaaaaatcatataggtttagtatttttttaaaaataaagataggattagttttactattcactgcttattacttttaaaaaaatcataaaggtttagtatttttttaaaataaatataggaatagttttactattcactgctttaatagaaaaatagtttaaaatttaagatagttttaatcccagcatttgccacgtttgaacgtgagccgaaacgatgtcgttacattatcttaacctagctgaaacgatgtcgtcataatatcgccaaatgccaactggactacgtcgaacccacaaatcccacaaagcgcgtgaaatcaaatcgctcaaaccacaaaaaagaacaacgcgtttgttacacgctcaatcccacgcgagtagagcacagtaaccttcaaataagcgaatggggcataatcagaaatccgaaataaacctaggggcattatcggaaatgaaaagtagctcactcaatataaaaatctaggaaccctagttttcgttatcactctgtgctccctcgctctatttctcagtctctgtgtttgcggctgaggattccgaacgagtgaccttcttcgtttctcgcaaaggtaacagcctctgctcttgtctcttcgattcgatctatgcctgtctcttatttacgatgatgtttcttcggttatgtttttttatttatgctttatgctgttgatgttcggttgtttgtttcgctttgtttttgtggttcagttttttaggattcttttggtttttgaatcgattaatcggaagagattttcgagttatttggtgtgttggaggtgaatcttttttttgaggtcatagatctgttgtatttgtgttataaacatgcgactttgtatgattttttacgaggttatgatgttctggttgttttattatgaatctgttgagacagaaccatgatttttgttgatgttcgtttacactattaaaggtttgttttaacaggattaaaagttttttaagcatgttgaaggagtcttgtagatatgtaaccgtcgatagtttttttgtgggtttgttcacatgttatcaagcttaatcttttactatgtatgcgaccatatctggatccagcaaaggcgattttttaattccttgtgaaacttttgtaatatgaagttgaaattttgttattggtaaactataaatgtgtgaagttggagtatacctttaccttcttatttggctttgtgatagtttaatttatatgtattttgagttctgacttgtatttctttgaattgattctagtttaagtaatccatggcacctaaaaagaagaggaaagttatggacaaaaagtactccatagggctcgatatcggcacaaacagtgtggggtgggcagtcatcactgacgactacaaggtcccctccaagaagttcaaggtcctcggcaatacagaccgccactccatcaagaagaacctcatcggagcactgttgttcgactccggagaaactgccgaagcaaccagactcaagaggaccgccagaagaaggtacacaaggcgcaagaacaggatctgctacctccaggagatcttcagtaacgagatggcaaaggtcgacgactctttcttccacaggctcgaggaatccttcctcgtcgaggaggacaagaagcatgagagacaccccatcttcggaaacatcgtcgacgaggtaagtttctgcttctacctttgatatatatataataattatcattaattagtagtaatataatatttcaaatatttttttcaaaataaaagaatgtagtatatagcaattgcttttctgtagtttataagtgtgtatattttaatttataacttttctaatatatgaccaaaacatggtgatgtgcaggtcgcctaccacgagaagtacccaaccatctaccacctgaggaagaagctcgtcgacagtaccgacaaggctgacctcaggctcatctacctcgcactcgcccacatgattaagttcaggggccacttcctcatagagggagacctcaacccagacaactccgacgtcgacaaactcttcatccaactcgtgcagacctacaatcaactctttgaagagaacccaatcaacgcctccggagtggatgctaaggctatattgtccgccaggctctccaaatcaagacgcctcgaaaacctcatcgcccagctcccaggggagaagaaaaatagcctcttcgggaacctcatagccctgtcccttggactcacccctaacttcaaatcaaatttcgacctcgcagaggacgctaagcttcaactctccaaggacacctacgacgacgacctcgataacctcctcgcccaaatcggtgatcaatacgctgacctcttcctcgctgctaagaacctctccgacgccatactcctctccgacattctgagggtcaacaccgagatcacaaaggctcccttgtccgcctccatgattaaacgctacgacgaacaccaccaggacctcaccctcttgaaggcactggttagacagcagctccccgagaagtacaaggaaatcttcttcgaccaatcaaaaaacggctacgccggatacatcgacggaggagcatcccaggaagagttctacaagttcatcaaaccaattctcgaaaagatggacggaacagaggagctcttggtcaagctcaacagggaggacctcctcagaaagcagagaaccttcgacaacggcagtatcccccaccagatccaccttggagagttgcacgcaatcctcaggaggcaagaggacttctaccccttcctcaaggacaacagggagaagatcgagaagatccttacattccgcatcccctactacgtcggacctttggcaagaggaaactcccgcttcgcatggatgactcgcaagagtgaggaaaccatcaccccttggaacttcgaggaggtcgtcgataagggagcttcagcccagtccttcatcgagcgcatgaccaacttcgataaaaatctccccaatgaaaaagtcctccccaagcacagtctgctctacgagtacttcacagtctacaacgagctcaccaaggtcaagtacgtcaccgaaggcatgagaaaacccgccttcctcagtggcgagcagaagaaggcaatcgtggacttgctgttcaagaccaaccgcaaggtcacagtcaagcaattaaaagaggactacttcaagaaaatagagtgcttcgacagtgtcgagatctctggggtcgaggacaggttcaacgcatccttggggacctatcacgacctcctcaagatcattaaagacaaggacttcctcgacaacgaggagaacgaggacatactggaggacatcgtcctcaccctcactctctttgaggacagggagatgatagaggagcgcctcaaaacctacgcccacctcttcgacgacaaggtgatgaaacagctcaagaggcgcagatacaccggatggggtagactctccaggaagctgattaatggcatccgcgacaaacagtccggcaagaccatcctcgacttcctcaagagtgacggattcgccaaccgcaacttcatgcagctcatacacgacgactccctcaccttcaaggaggacatccaaaaagcccaagtctccggacagggagactcattgcacgaacacatcgccaacttggctggatctcctgctattaaaaagggcatcctccaaaccgtcaaggtggtcgacgaactcgtcaaggtcatgggtagacacaagcccgaaaatatcgtcatcgagatggcaagggagaaccagacaacccagaagggccaaaaaaactccagggagcgcatgaaacgcatcgaggagggaataaaggagctcgggtcccagatcctcaaggagcaccccgtcgaaaatactcaactccagaatgaaaagctctacctctactacctccaaaacggcagggatatgtacgtcgaccaagagctcgacattaatcgcctctccgactacgacgtcgatcacatcgtcccccagagtttcctcaaggacgactccatcgacaacaaggtcctcaccagatccgataaaaatcgcggaaagtccgacaacgtcccctctgaggaagtggttaagaagatgaaaaactactggagacagctcctcaacgcaaagctgatcacccagcgcaagttcgacaacctcacaaaggctgagagagggggactctctgagttggacaaggccggcttcatcaagagacaactcgtggaaacccgccagatcaccaagcatgtcgcacagattctcgactcccgcatgaatactaaatacgatgaaaatgacaagctcatcagggaggtcaaggtcatcaccctgaagtccaagctcgtctccgacttccgcaaggacttccagttctacaaggtccgcgagatcaacaactaccaccacgcccacgacgcatacctcaacgctgtggttggaacagcactcatcaagaagtaccccaagctcgagtccgagttcgtctacggcgactacaaggtctacgacgtcaggaagatgatcgccaagtccgagcaagagatcggaaaggccaccgcaaaatatttcttctactccaacataatgaacttcttcaaaaccgagatcaccctggctaacggagaaataaggaagaggcccctgatagaaaccaacggcgagacaggcgagattgtctgggacaaaggcagggacttcgcaaccgtcagaaaggtgctcagtatgcctcaggtcaacatagtcaaaaagaccgaagtccagactggaggattctccaaggagtccatcctccccaaaaggaactccgacaaactgatcgccaggaaaaaggactgggaccccaaaaaatatggcggcttcgactcccctactgttgcttacagtgtgctcgtcgtcgcaaaagtcgagaaggggaaatccaagaagctcaagtcagtgaaggagctcctcggcatcaccatcatggagaggtcctccttcgagaagaaccccatcgacttcctcgaggccaagggatataaggaggtcaagaaggacctcatcattaaactccccaagtactccctcttcgagctcgaaaacggacgcaagaggatgctcgcttcagctggtgaactccagaagggcaacgaactcgctttgccctctaaatacgtcaacttcctctacctcgcctcccactatgaaaagctcaagggctccccagaggacaacgagcagaagcaactcttcgtcgagcagcacaagcattacctcgacgagatcatcgagcagatctccgagttctccaagagagtcatcctcgctgacgcaaacctcgacaaggtcctcagtgcatataacaagcaccgcgacaaaccaataagggagcaggccgaaaatattatacacctgttcaccctcaccaacttgggagcaccagccgccttcaagtatttcgacaccaccatcgacagaaagcgctacacctccacaaaggaggtcctggacgccacacttatccaccagtccatcaccggcctctatgaaacacgcatcgacctctctcaattgggaggggacaagagaccaagagacagacacgatggagagcttggaggtagaaagagagcaaggtagttcgaactggccaggtaccgttaacctagacttgtccatcttctggattggccaacttaattaatgtatgaaataaaaggatgcacacatagtgacatgctaatcactataatgtgggcatcaaagttgtgtgttatgtgtaattactagttatctgaataaaagagaaagagatcatccatatttcttatcctaaatgaatgtcacgtgtctttataattctttgatgaaccagatgcatttcattaaccaaatccatatacatataaatattaatcatatataattaatatcaattgggttagcaaaacaaatctagtctaggtgtgttttgcaagcttggcgcgccgttaacttaacggcaaacgctaattagtcactaggcccaggaaacactaactaagccctagcttatcctagcgcaacctagttaggtcttggtaacccggtccgggccattctggccgatcccgggcacccagctttcttgtacaaagtggggatcggccagaatggcccggaccgggttaccaagcggccgcgccgggtgtgatttagtataaagtgaagtaatggtcaaaagaaaaagtgtaaaacgaagtacctagtaataagtaatattgaacaaaataaatggtaaagtgtcagatatataaaataggctttaataaaaggaagaaaaaaaacaaacaaaaaataggttgcaatggggcagagcagagtcatcatgaagctagaaaggctaccgatagataaactatagttaattaaatacattaaaaaatacttggatctttctcttaccctgtttatattgagacctgaaacttgagagagatacactaatcttgccttgttgtttcattccctaacttacaggactcagcgcatgtcatgtggtctcgttccccatttaagtcccacaccgtctaaacttattaaattattaatgtttataactagatgcacaacaacaaagcttgtgtttggaacccttgagaggttttagagctagaaatagcaagttaaaataaggctagtccgttatcaacttgaaaaagtggcaccgagtcggtgcttttttttgcggccgcttgtaacccggtccgggccattctggccgatccgttgggcaactttattatacaaagttgatagatatcggtccgacggccagaatggccatctggattcagcaggcctagaaggccatttagtcctagcgatatcaggatattcttgtttaagatgttgaactctatggaggtttgtatgaactgatgatctaggaccggataagttcccttcttcatagcgaacttattcaaagaatgttttgtgtatcattcttgttacattgttattaatgaaaaaatattattggtcattggactgaacacgagtgttaaatatggaccaggccccaaataagatccattgatatatgaattaaataacaagaataaatcgagtcaccaaaccacttgccttttttaacgagacttgttcaccaacttgatacaaaagtcattatcctatgcaaatcaataatcatacaaaaatatccaataacactaaaaaattaaaagaaatggataatttcacaatatgttatacgataaagaagttacttttccaagaaattcactgattttataagcccacttgcattagataaatggcaaaaaaaaacaaaaaggaaaagaaataaagcacgaagaattctagaaaatacgaaatacgcttcaatgcagtgggacccacggttcaattattgccaattttcagctccaccgtatatttaaaaaataaaacgataatgctaaaaaaatataaatcgtaacgatcgttaaatctcaacggctggatcttatgacgaccgttagaaattgtggttgtcgacgagtcagtaataaacggcgtcaaagtggttgcagccggcacacacgagtcgtgtttatcaactcaaagcacaaatacttttcctcaacctaaaaataaggcaattagccaaaaacaactttgcgtgtaaacaacgctcaatacacgtgtcattttattattagctattgcttcaccgccttagctttctcgtgacctagtcgtcctcgtcttttcttcttcttcttctataaaacaatacccaaagagctcttcttcttcacaattcagatttcaatttctcaaaatcttaaaaactttctctcaattctctctaccgtgatcaaggtaaatttctgtgttccttattctctcaaaatcttcgattttgttttcgttcgatcccaatttcgtatatgttctttggtttagattctgttaatcttagatcgaagacgattttctgggtttgatcgttagatatcatcttaattctcgattagggtttcatagatatcatccgatttgttcaaataatttgagttttgtcgaataattactcttcgatttgtgatttctatctagatctggtgttagtttctagtttgtgcgatcgaatttgtcgattaatctgagtttttctgattaacagccatggctgcaactactcttacatctgctttacctggtgctttcagttcatcccagagaccaagtgctcctttcaacttacaaagatcacctagagtgcttagaaggttcaacagaaagacaggacgtcaacctcgtggacttgttcgtgctgcaaaggctcaagcggcgcaaaacctgccagagaaattcgatgaaacaagactctgggaggccctcaggggatttggggttagtccaagtagggttacttacgctcccgtcggattcggagattaccactggaccgtcacagatgaagacgggagaccttggttcgcaactgtcagtgacctcgaacacaaagagcattgcgggcagggagcacaagcagcccttaaaggactcagacaagctatggacactgccctcgcacttagagatagggacggactcagattcgtggttgctccagtggcagcaacagatgggggtggccctgtccttccccttgacgctaggtatgcactcacagtcttccctcacgtcccaggaagaacaggagagttcggacaaagactcacagaggcagagagggacagactgcttgctcttctggcagaactccacggaagaacacctcctgaaacaaccccaccagccgatatggaaccaccaggacttcctggtgttagagcagcactcgccgaaagtgaaggaccttggagtggaggaccatttgcagaacccgctagacttcttctcagagaacacgaggccacactgcacgcaagactcgctgaattcgaagccctcgtcgcaagagttaagggtcgtggagcacctcttgtcgttacccacggagaaccacacccaggcaacttgatcctcggagaggaaggctatctcctcgtggactgggatacagttggactggctccagctgaaagggatttgagtctcatctcagacgacccagctgacctcgcaagatacgcagagcttacaggaagaactccagacccagacgcactcgcactctatagactgcgttggagtctccttgatgtggctgagttcgtcgagtggttcagggctgaacaccaaagaacccaagacaccgagagtgcatggaaggggttcactgacacacttgggcaattggctgctggtggatcagctgcatagcctaggaaacttatctctgttatgaatcagaagaagttcatgtctcgtttcatttaaaactttggtggtttgtgttttggggccttgtaaagcccctgatgaataattgttcaactatgtttccgttcctgtgttatacctttctttctaatgagtaatgacatcaaacttcttctgtattgaaattatgtccttgtgagtctctttatcatcgtttcgtctttacattatatgtgctacttttgtctaatgagcctgaaaagtggctccaatggtacgcactggaagatttgttggcttctggtagatatagcgacagtgttgagcttgtaatatcatgtctcttattgctaaattagttcctttcttaacagaaaccttcaaagtttttgtttttgttttcatttacctaatgtacacatacgctggccatgactaacaacatgtccaggcttagagcatatttttttctagcttaaattgttaacttgtcattcagtaaaatccgagaattgtgaagctctaattgaagctaattcgttttataaagtcagttaaaaagtatactaaattatccaacttttcttcaaaatctcaaaattctatgacaaaacgatagtctttgtttatgtcagtaccacaaagaggtggaaaaaaacaccaaaaaaacaataagcaaactatacactgagaagaaaaataaaagagagctcaatagatgttttatactaacggtagattagatcaaagatccaagctttactctacatagagcagaacccagaatcccttcatatctcttttattctagcaccgataatctactgaaaagaagacacttagagctctgtctctttgtcaaagaagtcccagccgtcatccagaagctccttacgttcattaacagagggtgattgcggttacatcatgtacggaaaaataattctaatccttgatttaaatttgaacttgactatttatttattctttatttcattttgtaaatcattttatgtatctcctggcaagcaattttatccaccttgcaccaacaccttcgggttccataatcaaaccaccttaacttcacaccatgctgtaactcacaccgcccagcatctccaatgtgaaagaagctaaaatttaataaacaatcatacgaagcagtgacaaaataccagatggtattaatgcttcgataaaattaattggaaagtataaaatggtagaaaataataaattataattaatttaagtaagataaaaaataattaaaaactaaaatgttaaaattttaaaaaaattattttaaataatatttaaaaacattaaaaatcattttaaaaaatttatttatagaacaattaaataaatatttcagctaataaaaaacaaaagcttacctagccttagaagacaacttgtccaacaattagatgatacccattgcccttacgttttctttaacatcaattattgtttttgtcaacaagctatcttttagttttattttattggtaaaaaatatgtcgccttcaagttgcatcatttaacacatctcgtcattagaaaaataaaactcttccctaaacgattagtagaaaaaatcattcgataataaataagaaagaaaaattagaaaaaaataacttcattttaaaaaaatcattaaggctatattttttaaatgactaattttatatagactgtaactaaaagtatacaatttattatgctatgtatcttaaagaattacttataaaaatctacggaagaatatcttacaaagtgaaaaacaaatgagaaagaatttagtgggatgattatgattttatttgaaaattgaaaaaataattattaaagactttagtggagtaagaaagctttcctattagtcttttcttatccataaaaaaaaaaaaaaaaatctagcgtgacagcttttccatagattttaataatgtaaaatactggtagcagccgaccgttcaggtaatggacactgtggtcctaacttgcaacgggtgcgggcccaatttaataacgccgtggtaacggataaagccaagcgtgaagcggtgaaggtacatctctgactccgtcaagattacgaaaccgtcaactacgaaggactccccgaaatatcatctgtgtcataaacaccaagtcacaccatacatgggcacgcgtcacaatatgattggagaacggttccaccgcatatgctataaaatgcccccacacccctcgaccctaatcgcacttcaattgcaatcaaattagttcattctctttgcgcagttccctacctctcctttcaaggttcgtagatttcttccgtttttttttcttcttctttattgtttgttctacatcagcatgatgttgatttgattgtgttttctatcgtttcatcgattataaattttcataatcagaagattcagcttttattaatgcaagaacgtccttaattgatgattttataaccgtaaattaggtctaattagagtttttttcataaagattttcagatccgtttacaacaagccttaattgttgattctgtagtcgtagattaaggtttttttcatgaactacttcagatccgttaaacaacagccttatttgttgatacttcagtcgtttttcaagaaattgttcagatccgttgataaaagccttattcgttgattctgtatggtatttcaagagatattgctcaggtcctttagcaactaccttatttgttgattctgtggccatagattaggattttttttcacgaaattgcttcttgaaattacgtgatggattttgattctgatttatcttgtgattgttgactctacagatggcctcctccgagaacgtcatcaccgagttcatgcgcttcaaggtgcgcatggagggcaccgtgaacggccacgagttcgagatcgagggcgagggcgagggccgcccctacgagggccacaacaccgtgaagctgaaggtgacgaagggcggccccctgcccttcgcctgggacatcctgtccccccagttccagtacggctccaaggtgtacgtgaagcaccccgccgacatccccgactacaagaagctgtccttccccgagggcttcaagtgggagcgcgtgatgaacttcgaggacggcggcgtggcgaccgtgacccaggactcctccctgcaggacggctgcttcatctacaaggtgaagttcatcggcgtgaacttcccctccgacggccccgtgatgcagaagaagaccatgggctgggaggcctccaccgagcgcctgtacccccgcgacggcgtgctgaagggcgagacccacaaggccctgaagctgaaggacggcggccactacctggtggagttcaagtccatctacatggccaagaagcccgtgcagctgcccggctactactacgtggacgccaagctggacatcacctcccacaacgaggactacaccatcgtggagcagtacgagcgcaccgagggccgccaccacctgttcctgtagttttgtgatctgatgataagtggttggttcgtgtctcatgcacttgggaggtgatctatttcacctggtgtagtttgtgtttccgtcagttggaaaaacttatccctatcgatttcgttttcattttctgcttttcttttatgtaccttcgtttgggcttgtaacgggcctttgtatttcaactctcaataataatccaagtgcatgttaaacaatttgtcatctgtttcggctttgatatactactggtgaagatgggccgtactactgcatcacaacgaaaaataataataagatgaaaaacttgaagtggaaaaaaaaaaaacttgaatgttcactactactcattgaccataatgtttaacatacatagctcaatagtatttttgtgaatatggcaacacaaacagtccaaaacaattgtctcttactataccaaaccaagggcgccgcttgtttgccactctttgtgtgcaatagtgtgattaccacatctccacattcaatatattccctgaattatctgacgattttgatggctcactgttttcccaagtcttgaattgtcttctgtgcgccagtcaaatgcatatgtgttgagtttatcttttaaatatcaagcttttgtttttaacttttgtttgtaaccaaaaactcacagtaggagtttgatcacataattttatgtttgcctttgcaatttctagtgagtctttgattaaaagcttgaaaagaaaatgcagccaagcttaccaagtaagttatgtgtattaaccagaggaagagagaatcttgcaaaatttcaacaaacacaaaaagaagtattactacgattggtggagaaagaaaacgattccaaatcttgaactgttgttgtaaaagcatagcagaaagtgggagacaaccgaaatagaaatgactataacttaatttaatgttatcattataatttcttctagcaaatatttagaaagtaaatatcacatcaacctttaatgtaattaagctttctctttttgattcatgtgagatgaaaagaaaaaaaagaagagaaaagtgtagaaaacacatcatttctaagctgaagccacttacgcttgattccgatgacttcgtaggttcctagctcaagccgctcgtgtccaagcgtcacttacgattagctaatgattacggcatctaggaccgactagttcttatgtgcttctagtctccaaatgtggttgatagttattttgctctaagatcaacagtaatgaagtataaatcatcgttgtggtgtgctactcggttaattgagcattaacacacacaaacatgacgaggatggtataatctccaaaaatgtgtactttgttaggtgggaccctatagccttgattaatgtgctatgttaggcatgcctggaaacgtgtgacgcatatgttttgtgaacctgttgatattatatgtgcttttatattaccatattttattaaaatactaatatttattactagtaagatataacattctatctagcttaaaaactaaccataaatattccataataactagatttaccaaactaatatactaaatatacataataaatacaaaattaacaagacaataatcaatatttatgagcttaatatatttagacattatggttggtcgacgataatcatgctaacttttcgtaattgcttgattgaaatatgcttagaataatgcctctttgttctacatggcaaatagggaccattatggtgtaacaccctgggaaccacaaacaccccgaaatgctactaaactacacaactaaccttcatatataaaatttcgacagcatctcctttgaaaatttgcatagacgtggaagcaacagagtataaacagatctagctagctaagtttaaacggccggccaaacgtgcaagcgctactagacaattcagtacattaaaaacgtccgcaatgtgttattaagttgtctaagcgtcaatttatttacaattgaatatatcctgccaccagccagccaacagctccccgaccggcagctcggcacaaaatcaccactcgatacaggcagcccatcagtccgggacggcgtcagcgggagagccgttgtaaggcggcagactttgctcatgttaccgatgctattcggaagaacggcaactaagctgccgggtttgaaacacggatgatctcgcggagggtagcatgttgattgtaacgatgacagagcgttgctgcctgtgatcaaatatcatctccctcgcagagatccgaattatcagccttcttattcatttctcgcttaaccgtgacaggcgcgcgcggtgccacctgggtccttttcatcacgtgctataaaaataattataatttaaattttttaatataaatatataaattaaaaatagaaagtaaaaaaagaaattaaagaaaaaatagtttttgttttccgaagatgtaaaagactctagggggatcgccaacaaatactaccttttatcttgctcttcctgctctcaggtattaatgccgaattgtttcatcttgtctgtgtagaagaccacacacgaaaatcctgtgattttacattttacttatcgttaatcgaatgtatatctatttaatctgcttttcttgtctaataaatatatatgtaaagtacgctttttgttgaaattttttaaacctttgtttatttttttttcttcattccgtaactcttctaccttctttatttactttctaaaatccaaatacaaaacataaaaataaataaacacagagtaaattcccaaattattccatcattaaaagatacgaggcgcgtgtaagttacaggcaagcgatccgtcctaagaaaccattattatcatgacattaacctataaaaataggcgtatcacgaggccctttcgtctcgcgcgtttcggtgatgacggtgaaaacctctgacacatgcagctcccggagacggtcacagcttgtctgtaagcggatgccgggagcagacaagcccgtcagggcgcgtcagcgggtgttggcgggtgtcggggctggcttaactatgcggcatcagagcagattgtactgagagtgcaccataccacagcttttcaattcaattcatcattttttttttattcttttttttgatttcggtttctttgaaatttttttgattcggtaatctccgaacagaaggaagaacgaaggaaggagcacagacttagattggtatatatacgcatatgtagtgttgaagaaacatgaaattgcccagtattcttaacccaactgcacagaacaaaaacctgcaggaaacgaagataaatcatgtcgaaagctacatataaggaacgtgctgctactcatcctagtcctgttgctgccaagctatttaatatcatgcacgaaaagcaaacaaacttgtgtgcttcattggatgttcgtaccaccaaggaattactggagttagttgaagcattaggtcccaaaatttgtttactaaaaacacatgtggatatcttgactgatttttccatggagggcacagttaagccgctaaaggcattatccgccaagtacaattttttactcttcgaagacagaaaatttgctgacattggtaatacagtcaaattgcagtactctgcgggtgtatacagaatagcagaatgggcagacattacgaatgcacacggtgtggtgggcccaggtattgttagcggtttgaagcaggcggcagaagaagtaacaaaggaacctagaggccttttgatgttagcagaattgtcatgcaagggctccctatctactggagaatatactaagggtactgttgacattgcgaagagcgacaaagattttgttatcggctttattgctcaaagagacatgggtggaagagatgaaggttacgattggttgattatgacacccggtgtgggtttagatgacaagggagacgcattgggtcaacagtatagaaccgtggatgatgtggtctctacaggatctgacattattattgttggaagaggactatttgcaaagggaagggatgctaaggtagagggtgaacgttacagaaaagcaggctgggaagcatatttgagaagatgcggccagcaaaactaaaaaactgtattataagtaaacgcgcgcgggcgcgcctaaaacagcttgcgtcatgcggtcgctgcgtatatgatgcgatgagtaaataaacaaatacgcaaggggaacgcatgaaggttatcgctgtacttaaccagaaaggcgggtcaggcaagacgaccatcgcaacccatctagcccgcgccctgcaactcgccggggccgatgttctgttagtcgattccgatccccagggcagtgcccgcgattgggcggccgtgcgggaagatcaaccgctaaccgttgtcggcatcgaccgcccgacgattgaccgcgacgtgaaggccatcggccggcgcgacttcgtagtgatcgacggagcgccccaggcggcggacttggctgtgtccgcgatcaaggcagccgacttcgtgctgattccggtgcagccaagcccttacgacatatgggccaccgccgacctggtggagctggttaagcagcgcattgaggtcacggatggaaggctacaagcggcctttgtcgtgtcgcgggcgatcaaaggcacgcgcatcggcggtgaggttgccgaggcgctggccgggtacgagctgcccattcttgagtcccgtatcacgcagcgcgtgagctacccaggcactgccgccgccggcacaaccgttcttgaatcagaacccgagggcgacgctgcccgcgaggtccaggcgctggccgctgaaattaaatcaaaactcatttgagttaatgaggtaaagagaaaatgagcaaaagcacaaacacgctaagtgccggccgtccgagcgcacgcagcagcaaggctgcaacgttggccagcctcgcagacacgccagccatgaagcgggtcaactttcagttgccggcggaggatcacaccaagctgaagatgtacgcggtacgccaaggcaagaccattaccgagctgctatctgaatacatcgcgcagctaccagagtaaatgagcaaatgaataaatgagtagatgaattttagcggctaaaggaggcggcatggaaaatcaagaacaaccaggcaccgacgccgtggaatgccccatgtgtggaggaacgggcggttggccaggcgtaagcggctgggttgcctgccggccctgcaatggcactggaacccccaagcccgaggaatcggcgtgagcggtcgcaaaccatccggcccggtacaaatcggcgcggcgctgggtgatgacctggtggagaagttgaaggcagcgcaggccgcccagcggcaacgcatcgaggcagaagcacgccccggtgaatcgtggcaagcagccgctgatcgaatccgcaaagaatcccggcaaccgccggcagccggtgcgccgtcgattaggaagccgcccaagggcgacgagcaaccagattttttcgttccgatgctctatgacgtgggcacccgcgatagtcgcagcatcatggacgtggccgttttccgtctgtcgaagcgtgaccgacgagctggcgaggtgatccgctacgagcttccagacgggcacgtagaggtttccgcagggccggcaggcatggccagtgtgtgggattacgacctggtactgatggcggtttcccatctaaccgaatccatgaaccgataccgggaagggaagggagacaagcccggccgcgtgttccgtccacacgttgcggacgtactcaagttctgccggcgagccgatggcggaaagcagaaagacgacctggtagaaacctgcattcggttaaacaccacgcacgttgccatgcagcgtacgaagaaggccaagaacggccgcctggtgacggtatccgagggtgaagccttgattagccgctacaagatcgtaaagagcgaaaccgggcggccggagtacatcgagatcgagctagctgattggatgtaccgcgagatcacagaaggcaagaacccggacgtgctgacggttcaccccgattactttttgatcgatcccggcatcggccgttttctctaccgcctggcacgccgcgccgcaggcaaggcagaagccagatggttgttcaagacgatctacgaacgcagtggcagcgccggagagttcaagaagttctgtttcaccgtgcgcaagctgatcgggtcaaatgacctgccggagtacgatttgaaggaggaggcggggcaggctggcccgatcctagtcatgcgctaccgcaacctgatcgagggcgaagcatccgccggttcctaatgtacggagcagatgctagggcaaattgccctagcaggggaaaaaggtcgaaaaggtctctttcctgtggatagcacgtacattgggaacccaaagccgtacattgggaaccggaacccgtacattgggaacccaaagccgtacattgggaaccggtcacacatgtaagtgactgatataaaagagaaaaaaggcgatttttccgcctaaaactctttaaaacttattaaaactcttaaaacccgcctggcctgtgcataactgtctggccagcgcacagccgaagagctgcaaaaagcgcctacccttcggtcgctgcgctccctacgccccgccgcttcgcgtcggcctatggcgcgccggaaaatatgcatggcatgcccgttccatacagaagctgggcgaacaaacgatgctcgccttccagaaaaccgaggatgcgaaccacttcatccggggtcagcaccaccggcaagcgccgcgacggccgaggtcttccgatctcctgaagccagggcagatccgtgcacagcaccttgccgtagaagaacagcaaggccgccaatgcctgacgatgcgtggagaccgaaaccttgcgctcgttcgccagccaggacagaaatgcctcgacttcgctgctgcccaaggttgccgggtgacgcacaccgtggaaacggatgaaggcacgaacccagtggacataagcctgttcggttcgtaagctgtaatgcaagtagcgtatgcgctcacgcaactggtccagaaccttgaccgaacgcagcggtggtaacggcgcagtggcggttttcatggcttgttatgactgtttttttggggtacagtctatgcctcgggcatccaagcagcaagcgcgttacgccgtgggtcgatgtttgatgttatggagcagcaacgatgttacgcagcagggcagtcgccctaaaacaaagttaaacatcatgagggaagcggtgatcgccgaagtatcgactcaactatcagaggtagttggcgtcatcgagcgccatctcgaaccgacgttgctggccgtacatttgtacggctccgcagtggatggcggcctgaagccacacagtgatattgatttgctggttacggtgacggtaaggcttgatgaaacaacgcggcgagctttgatcaacgaccttttggaaacttcggcttcccctggagagagcgagattctccgcgctgtagaagtcaccattgttgtgcacgacgacatcattccgtggcgttatccagctaagcgcgaactgcaatttggagaatggcagcgcaatgacattcttgcaggtatcttcgagccagccacgatcgacattgatctggctatcttgctgacaaaagcaagagaacatagcgttgccttggtaggtccagcggcggaggaactctttgatccggttcctgaacaggatctatttgaggcgctaaatgaaaccttaacgctatggaactcgccgcccgactgggctggcgatgagcgaaatgtagtgcttacgttgtcccgcatttggtacagcgcagtaaccggcaaaatcgcgccgaaggatgtcgctgccgactgggcaatggagcgcctgccggcccagtatcagcccgtcatacttgaagctagacaggcttatcttggacaagaagaagatcgcttggcctcgcgcgcagatcagttggaagaatttgtccactacgtgaaaggcgagatcaccaaggtagtcggcaaataatgtctaacaattcgttcaagccgacgccgcttcgcggcgcggcttaactcaagcgttagatgcactatacgtaaccaactagtaggaacagtgaattggagttcgtcttgttataattagcttcttgggggatctttaaatactgtagaaaagaggaaggaaataataaatggctaaaatgagaatatcaccggaattgaaaaaactgatcgaaaaataccgctgcgtaaaagatacggaaggaatgtctcctgctaaggtatataagctggtgggagaaaatgaaaacctatatttaaaaatgacggacagccggtataaagggaccacctatgatgtggaacgggaaaaggacatgatgctatggctggaaggaaagctgcctgttccaaaggtcctgcactttgaacggcatgatggctggagcaatctgctcatgagtgaggccgatggcgtcctttgctcggaagagtatgaagatgaacaaagccctgaaaagattatcgagctgtatgcggagtgcatcaggctctttcactccatcgacatatcggattgtccctatacgaatagcttagacagccgcttagccgaattggattacttactgaataacgatctggccgatgtggattgcgaaaactgggaagaagacactccatttaaagatccgcgcgagctgtatgattttttaaagacggaaaagcccgaagaggaacttgtcttttcccacggcgacctgggagacagcaacatctttgtgaaagatggcaaagtaagtggctttattgatcttgggagaagcggcagggcggacaagtggtatgacattgccttctgcgtccggtcgatcagggaggatatcggggaagaacagtatgtcgagctattttttgacttactggggatcaagcctgattgggagaaaataaaatattatattttactggatgaattgttttagtacctagatacttcgctcgtgaaaagcagcgctcagggggctagtgcgctcttccgcttcctcgctcactgactcgctgcgctcggtcgttcggctgcggcgagcggtatcagctcactcaaaggcggtaatacggttatccacagaatcaggggataacgcaggaaagaacatgtgagcaaaaggccagcaaaaggccaggaaccgtaaaaaggccgcgttgctggcgtttttccataggctccgcccccctgacgagcatcacaaaaatcgacgctcaagtcagaggtggcgaaacccgacaggactataaagataccaggcgtttccccctggaagctccctcgtgcgctctcctgttccgaccctgccgcttaccggatacctgtccgcctttctcccttcgggaagcgtggcgctttctcatagctcacgctgtaggtatctcagttcggtgtaggtcgttcgctccaagctgggctgtgtgcacgaaccccccgttcagcccgaccgctgcgccttatccggtaactatcgtcttgagtccaacccggtaagacacgacttatcgccactggcagcagccactggtaacaggattagcagagcgaggtatgtaggcggtgctacagagttcttgaagtggtggcctaactacggctacactagaagaacagtatttggtatctgcgctctgctgaagccagttaccttcggaaaaagagttggtagctcttgatccggcaaacaaaccaccgctggtagcggtggtttttttgtttgcaagcagcagattacgcgcagaaaaaaaggatctcaagaagatcctttgatcttttctacggggtctgacgctcagtggaacgaaaactcacgttaagggattttggtcatgagattatcaaaaaggatcttcacctagatccttttaaattaaaaatgaagcgtacgttggaatcg

SEQ ID NO: 32 - DNA, 25346 bp, Artificial Sequence
  Nucleotide sequence of RV019930 construct
cttctacaaaactcacagaaacaatcaaacaaacatacacagcgatttattcacacgaacccgaattacaacggtatatatcctgtcagccaacaccaaaacatcaaaaaaatcgggatcaggatcaggatctgcggccgcatcctgcaggagctcaaacgagcaggaagcaacgagagggtggcgcgcgaccgacgtgcgtacgtagcatgagcctgagtggagacgttggacgtgtatgtatatacctctctgcgtgttaactatgtacgtaagcggcaggcagtgcaataagtgtggctctgtagtatgtacgtgcgggtacgatgctgtaagctactgaggcaagtccataaataaataatgacacgtgcgtgttctataatctcttcgcttcttcatttgtccccttgcggagtttggcatccattgatgccgttacgctgagaacagacacagcagacgaaccaaaagtgagttcttgtatgaaactatgacccttcatcgctaggctcaaacagcaccccgtacgaacacagcaaattagtcatctaactattagcccctacatgtttcagacgatacataaatatagcccatccttagcaattagctattggccctgcccatcccaagcaatgatctcgaagtatttttaatatatagtatttttaatatgtagcttttaaaattagaagataattttgagacaaaaatctccaagtatttttttgggtattttttactgcctccgtttttctttatttctcgtcacctagtttaattttgtgctaatcggctataaacgaaacagagagaaaagttactctaaaagcaactccaacagattagatataaatcttatatcctgcctagagctgttaaaaagatagacaactttagtggattagtgtatgcaacaaactctccaaatttaagtatcccaactacccaacgcatatcgttcccttttcattggcgcacgaactttcacctgctatagccgacgtacatgttcgttttttttgggcggcgcttactttcttccccgttcgttctcagcatcgcaactcaatttgttatggcggagaagcccttgtatcccaggtagtaatgcacagatatgcattattattattcataaaacgaacgctcttcaactggaagagcggttactaccggttcactagctagctgctaatcgagctagttaccctatgaggtgacatgaagcgctcacggttactatgacggttagcttcacgactgttggtggcagtagcgtacgacttagctatagttccggacttacctagctaggttaccagagctggtcaccttcttcatcgctaagaagacactcagtagtccggaccgatatcgctatcaactttgtatagaaaagttgggccagaatggcccggaccgggttaccaagcggccgcaattggatcgggtttacttattttgtgggtatctatacttttattagatttttaatcaggctcctgatttctttttatttcgattgaattcctgaacttgtattattcagtagatcgaataaattataaaaagataaaatcataaaataatattttatcctatcaatcatattaaagcaatgaatatgtaaaattaatcttatctttattttaaaaaatcatataggtttagtatttttttaaaaataaagataggattagttttactattcactgcttattacttttaaaaaaatcataaaggtttagtatttttttaaaataaatataggaatagttttactattcactgctttaatagaaaaatagtttaaaatttaagatagttttaatcccagcatttgccacgtttgaacgtgagccgaaacgatgtcgttacattatcttaacctagctgaaacgatgtcgtcataatatcgccaaatgccaactggactacgtcgaacccacaaatcccacaaagcgcgtgaaatcaaatcgctcaaaccacaaaaaagaacaacgcgtttgttacacgctcaatcccacgcgagtagagcacagtaaccttcaaataagcgaatggggcataatcagaaatccgaaataaacctaggggcattatcggaaatgaaaagtagctcactcaatataaaaatctaggaaccctagttttcgttatcactctgtgctccctcgctctatttctcagtctctgtgtttgcggctgaggattccgaacgagtgaccttcttcgtttctcgcaaaggtaacagcctctgctcttgtctcttcgattcgatctatgcctgtctcttatttacgatgatgtttcttcggttatgtttttttatttatgctttatgctgttgatgttcggttgtttgtttcgctttgtttttgtggttcagttttttaggattcttttggtttttgaatcgattaatcggaagagattttcgagttatttggtgtgttggaggtgaatcttttttttgaggtcatagatctgttgtatttgtgttataaacatgcgactttgtatgattttttacgaggttatgatgttctggttgttttattatgaatctgttgagacagaaccatgatttttgttgatgttcgtttacactattaaaggtttgttttaacaggattaaaagttttttaagcatgttgaaggagtcttgtagatatgtaaccgtcgatagtttttttgtgggtttgttcacatgttatcaagcttaatcttttactatgtatgcgaccatatctggatccagcaaaggcgattttttaattccttgtgaaacttttgtaatatgaagttgaaattttgttattggtaaactataaatgtgtgaagttggagtatacctttaccttcttatttggctttgtgatagtttaatttatatgtattttgagttctgacttgtatttctttgaattgattctagtttaagtaatccatggcacctaaaaagaagaggaaagttatggacaaaaagtactccatagggctcgatatcggcacaaacagtgtggggtgggcagtcatcactgacgactacaaggtcccctccaagaagttcaaggtcctcggcaatacagaccgccactccatcaagaagaacctcatcggagcactgttgttcgactccggagaaactgccgaagcaaccagactcaagaggaccgccagaagaaggtacacaaggcgcaagaacaggatctgctacctccaggagatcttcagtaacgagatggcaaaggtcgacgactctttcttccacaggctcgaggaatccttcctcgtcgaggaggacaagaagcatgagagacaccccatcttcggaaacatcgtcgacgaggtaagtttctgcttctacctttgatatatatataataattatcattaattagtagtaatataatatttcaaatatttttttcaaaataaaagaatgtagtatatagcaattgcttttctgtagtttataagtgtgtatattttaatttataacttttctaatatatgaccaaaacatggtgatgtgcaggtcgcctaccacgagaagtacccaaccatctaccacctgaggaagaagctcgtcgacagtaccgacaaggctgacctcaggctcatctacctcgcactcgcccacatgattaagttcaggggccacttcctcatagagggagacctcaacccagacaactccgacgtcgacaaactcttcatccaactcgtgcagacctacaatcaactctttgaagagaacccaatcaacgcctccggagtggatgctaaggctatattgtccgccaggctctccaaatcaagacgcctcgaaaacctcatcgcccagctcccaggggagaagaaaaatagcctcttcgggaacctcatagccctgtcccttggactcacccctaacttcaaatcaaatttcgacctcgcagaggacgctaagcttcaactctccaaggacacctacgacgacgacctcgataacctcctcgcccaaatcggtgatcaatacgctgacctcttcctcgctgctaagaacctctccgacgccatactcctctccgacattctgagggtcaacaccgagatcacaaaggctcccttgtccgcctccatgattaaacgctacgacgaacaccaccaggacctcaccctcttgaaggcactggttagacagcagctccccgagaagtacaaggaaatcttcttcgaccaatcaaaaaacggctacgccggatacatcgacggaggagcatcccaggaagagttctacaagttcatcaaaccaattctcgaaaagatggacggaacagaggagctcttggtcaagctcaacagggaggacctcctcagaaagcagagaaccttcgacaacggcagtatcccccaccagatccaccttggagagttgcacgcaatcctcaggaggcaagaggacttctaccccttcctcaaggacaacagggagaagatcgagaagatccttacattccgcatcccctactacgtcggacctttggcaagaggaaactcccgcttcgcatggatgactcgcaagagtgaggaaaccatcaccccttggaacttcgaggaggtcgtcgataagggagcttcagcccagtccttcatcgagcgcatgaccaacttcgataaaaatctccccaatgaaaaagtcctccccaagcacagtctgctctacgagtacttcacagtctacaacgagctcaccaaggtcaagtacgtcaccgaaggcatgagaaaacccgccttcctcagtggcgagcagaagaaggcaatcgtggacttgctgttcaagaccaaccgcaaggtcacagtcaagcaattaaaagaggactacttcaagaaaatagagtgcttcgacagtgtcgagatctctggggtcgaggacaggttcaacgcatccttggggacctatcacgacctcctcaagatcattaaagacaaggacttcctcgacaacgaggagaacgaggacatactggaggacatcgtcctcaccctcactctctttgaggacagggagatgatagaggagcgcctcaaaacctacgcccacctcttcgacgacaaggtgatgaaacagctcaagaggcgcagatacaccggatggggtagactctccaggaagctgattaatggcatccgcgacaaacagtccggcaagaccatcctcgacttcctcaagagtgacggattcgccaaccgcaacttcatgcagctcatacacgacgactccctcaccttcaaggaggacatccaaaaagcccaagtctccggacagggagactcattgcacgaacacatcgccaacttggctggatctcctgctattaaaaagggcatcctccaaaccgtcaaggtggtcgacgaactcgtcaaggtcatgggtagacacaagcccgaaaatatcgtcatcgagatggcaagggagaaccagacaacccagaagggccaaaaaaactccagggagcgcatgaaacgcatcgaggagggaataaaggagctcgggtcccagatcctcaaggagcaccccgtcgaaaatactcaactccagaatgaaaagctctacctctactacctccaaaacggcagggatatgtacgtcgaccaagagctcgacattaatcgcctctccgactacgacgtcgatcacatcgtcccccagagtttcctcaaggacgactccatcgacaacaaggtcctcaccagatccgataaaaatcgcggaaagtccgacaacgtcccctctgaggaagtggttaagaagatgaaaaactactggagacagctcctcaacgcaaagctgatcacccagcgcaagttcgacaacctcacaaaggctgagagagggggactctctgagttggacaaggccggcttcatcaagagacaactcgtggaaacccgccagatcaccaagcatgtcgcacagattctcgactcccgcatgaatactaaatacgatgaaaatgacaagctcatcagggaggtcaaggtcatcaccctgaagtccaagctcgtctccgacttccgcaaggacttccagttctacaaggtccgcgagatcaacaactaccaccacgcccacgacgcatacctcaacgctgtggttggaacagcactcatcaagaagtaccccaagctcgagtccgagttcgtctacggcgactacaaggtctacgacgtcaggaagatgatcgccaagtccgagcaagagatcggaaaggccaccgcaaaatatttcttctactccaacataatgaacttcttcaaaaccgagatcaccctggctaacggagaaataaggaagaggcccctgatagaaaccaacggcgagacaggcgagattgtctgggacaaaggcagggacttcgcaaccgtcagaaaggtgctcagtatgcctcaggtcaacatagtcaaaaagaccgaagtccagactggaggattctccaaggagtccatcctccccaaaaggaactccgacaaactgatcgccaggaaaaaggactgggaccccaaaaaatatggcggcttcgactcccctactgttgcttacagtgtgctcgtcgtcgcaaaagtcgagaaggggaaatccaagaagctcaagtcagtgaaggagctcctcggcatcaccatcatggagaggtcctccttcgagaagaaccccatcgacttcctcgaggccaagggatataaggaggtcaagaaggacctcatcattaaactccccaagtactccctcttcgagctcgaaaacggacgcaagaggatgctcgcttcagctggtgaactccagaagggcaacgaactcgctttgccctctaaatacgtcaacttcctctacctcgcctcccactatgaaaagctcaagggctccccagaggacaacgagcagaagcaactcttcgtcgagcagcacaagcattacctcgacgagatcatcgagcagatctccgagttctccaagagagtcatcctcgctgacgcaaacctcgacaaggtcctcagtgcatataacaagcaccgcgacaaaccaataagggagcaggccgaaaatattatacacctgttcaccctcaccaacttgggagcaccagccgccttcaagtatttcgacaccaccatcgacagaaagcgctacacctccacaaaggaggtcctggacgccacacttatccaccagtccatcaccggcctctatgaaacacgcatcgacctctctcaattgggaggggacaagagaccaagagacagacacgatggagagcttggaggtagaaagagagcaaggtagttcgaactggccaggtaccgttaacctagacttgtccatcttctggattggccaacttaattaatgtatgaaataaaaggatgcacacatagtgacatgctaatcactataatgtgggcatcaaagttgtgtgttatgtgtaattactagttatctgaataaaagagaaagagatcatccatatttcttatcctaaatgaatgtcacgtgtctttataattctttgatgaaccagatgcatttcattaaccaaatccatatacatataaatattaatcatatataattaatatcaattgggttagcaaaacaaatctagtctaggtgtgttttgcaagcttggcgcgccgttaacttaacggcaaacgctaattagtcactaggcccaggaaacactaactaagccctagcttatcctagcgcaacctagttaggtcttggtaacccggtccgggccattctggccgatcccgggcaagtttgtacaaaaaagcaggctggatcggccagaatggccccggaccgggttaccaagcggccgcgccgggtgtgatttagtataaagtgaagtaatggtcaaaagaaaaagtgtaaaacgaagtacctagtaataagtaatattgaacaaaataaatggtaaagtgtcagatatataaaataggctttaataaaaggaagaaaaaaaacaaacaaaaaataggttgcaatggggcagagcagagtcatcatgaagctagaaaggctaccgatagataaactatagttaattaaatacattaaaaaatacttggatctttctcttaccctgtttatattgagacctgaaacttgagagagatacactaatcttgccttgttgtttcattccctaacttacaggactcagcgcatgtcatgtggtctcgttccccatttaagtcccacaccgtctaaacttattaaattattaatgtttataactagatgcacaacaacaaagcttgtgtttggaacccttgagaggttttagagctagaaatagcaagttaaaataaggctagtccgttatcaacttgaaaaagtggcaccgagtcggtgcttttttttgcggccgcttgtaacccggtccgggccattctggccgatccgttggggtcggaggagactagccgttagttagtgcagaccgtctctaatcagtgactagcgacgtcccgacccacccagctttcttgtacaaagtggggatcggccagaatggcccggaccgggttaccaagcggccgcggaattccaccgggttaagagaattgtaagtgtgcttttatatatttaaaattaatatattttgaaatgttaaaatataaaagaaaattcaatgtaaattaaaaataaataaatgtttaataaagataaattttaaaacataaaagaaaatgtctaacaagaggattaagatcctgtgctcttaaatttttaggtgttgaaatcttagccatacaaaatatattttattaaaaccaagcatgaaaaaagtcactaaagagctatataactcatgcagctagaaatgaagtgaagggaatccagtttgttctcagtcgaaagagtgtctatctttgttcttttctgcaaccgagttaagcaaaatgggaatgcgaggtatcttcctttcgttaggggagcaccagatgcatagttagtcccacattgatgaatataacaagagcttcacagaatatatagcccaggccacagtaaaagcttgcataactgagggatctccagttttagagctagaaatagcaagttaaaataaggctagtccgttatcaacttgaaaaagtggcaccgagtcggtgctttttttcccgggcaactttattatacaaagttgatagatatcggtccgacggccagaatggccatctggattcagcaggcctagaaggccatttagtcctagcgatatcaggatattcttgtttaagatgttgaactctatggaggtttgtatgaactgatgatctaggaccggataagttcccttcttcatagcgaacttattcaaagaatgttttgtgtatcattcttgttacattgttattaatgaaaaaatattattggtcattggactgaacacgagtgttaaatatggaccaggccccaaataagatccattgatatatgaattaaataacaagaataaatcgagtcaccaaaccacttgccttttttaacgagacttgttcaccaacttgatacaaaagtcattatcctatgcaaatcaataatcatacaaaaatatccaataacactaaaaaattaaaagaaatggataatttcacaatatgttatacgataaagaagttacttttccaagaaattcactgattttataagcccacttgcattagataaatggcaaaaaaaaacaaaaaggaaaagaaataaagcacgaagaattctagaaaatacgaaatacgcttcaatgcagtgggacccacggttcaattattgccaattttcagctccaccgtatatttaaaaaataaaacgataatgctaaaaaaatataaatcgtaacgatcgttaaatctcaacggctggatcttatgacgaccgttagaaattgtggttgtcgacgagtcagtaataaacggcgtcaaagtggttgcagccggcacacacgagtcgtgtttatcaactcaaagcacaaatacttttcctcaacctaaaaataaggcaattagccaaaaacaactttgcgtgtaaacaacgctcaatacacgtgtcattttattattagctattgcttcaccgccttagctttctcgtgacctagtcgtcctcgtcttttcttcttcttcttctataaaacaatacccaaagagctcttcttcttcacaattcagatttcaatttctcaaaatcttaaaaactttctctcaattctctctaccgtgatcaaggtaaatttctgtgttccttattctctcaaaatcttcgattttgttttcgttcgatcccaatttcgtatatgttctttggtttagattctgttaatcttagatcgaagacgattttctgggtttgatcgttagatatcatcttaattctcgattagggtttcatagatatcatccgatttgttcaaataatttgagttttgtcgaataattactcttcgatttgtgatttctatctagatctggtgttagtttctagtttgtgcgatcgaatttgtcgattaatctgagtttttctgattaacagccatggctgcaactactcttacatctgctttacctggtgctttcagttcatcccagagaccaagtgctcctttcaacttacaaagatcacctagagtgcttagaaggttcaacagaaagacaggacgtcaacctcgtggacttgttcgtgctgcaaaggctcaagcggcgcaaaacctgccagagaaattcgatgaaacaagactctgggaggccctcaggggatttggggttagtccaagtagggttacttacgctcccgtcggattcggagattaccactggaccgtcacagatgaagacgggagaccttggttcgcaactgtcagtgacctcgaacacaaagagcattgcgggcagggagcacaagcagcccttaaaggactcagacaagctatggacactgccctcgcacttagagatagggacggactcagattcgtggttgctccagtggcagcaacagatgggggtggccctgtccttccccttgacgctaggtatgcactcacagtcttccctcacgtcccaggaagaacaggagagttcggacaaagactcacagaggcagagagggacagactgcttgctcttctggcagaactccacggaagaacacctcctgaaacaaccccaccagccgatatggaaccaccaggacttcctggtgttagagcagcactcgccgaaagtgaaggaccttggagtggaggaccatttgcagaacccgctagacttcttctcagagaacacgaggccacactgcacgcaagactcgctgaattcgaagccctcgtcgcaagagttaagggtcgtggagcacctcttgtcgttacccacggagaaccacacccaggcaacttgatcctcggagaggaaggctatctcctcgtggactgggatacagttggactggctccagctgaaagggatttgagtctcatctcagacgacccagctgacctcgcaagatacgcagagcttacaggaagaactccagacccagacgcactcgcactctatagactgcgttggagtctccttgatgtggctgagttcgtcgagtggttcagggctgaacaccaaagaacccaagacaccgagagtgcatggaaggggttcactgacacacttgggcaattggctgctggtggatcagctgcatagcctaggaaacttatctctgttatgaatcagaagaagttcatgtctcgtttcatttaaaactttggtggtttgtgttttggggccttgtaaagcccctgatgaataattgttcaactatgtttccgttcctgtgttatacctttctttctaatgagtaatgacatcaaacttcttctgtattgaaattatgtccttgtgagtctctttatcatcgtttcgtctttacattatatgtgctacttttgtctaatgagcctgaaaagtggctccaatggtacgcactggaagatttgttggcttctggtagatatagcgacagtgttgagcttgtaatatcatgtctcttattgctaaattagttcctttcttaacagaaaccttcaaagtttttgtttttgttttcatttacctaatgtacacatacgctggccatgactaacaacatgtccaggcttagagcatatttttttctagcttaaattgttaacttgtcattcagtaaaatccgagaattgtgaagctctaattgaagctaattcgttttataaagtcagttaaaaagtatactaaattatccaacttttcttcaaaatctcaaaattctatgacaaaacgatagtctttgtttatgtcagtaccacaaagaggtggaaaaaaacaccaaaaaaacaataagcaaactatacactgagaagaaaaataaaagagagctcaatagatgttttatactaacggtagattagatcaaagatccaagctttactctacatagagcagaacccagaatcccttcatatctcttttattctagcaccgataatctactgaaaagaagacacttagagctctgtctctttgtcaaagaagtcccagccgtcatccagaagctccttacgttcattaacagagggtgattgcggttacatcatgtacggaaaaataattctaatccttgatttaaatttgaacttgactatttatttattctttatttcattttgtaaatcattttatgtatctcctggcaagcaattttatccaccttgcaccaacaccttcgggttccataatcaaaccaccttaacttcacaccatgctgtaactcacaccgcccagcatctccaatgtgaaagaagctaaaatttaataaacaatcatacgaagcagtgacaaaataccagatggtattaatgcttcgataaaattaattggaaagtataaaatggtagaaaataataaattataattaatttaagtaagataaaaaataattaaaaactaaaatgttaaaattttaaaaaaattattttaaataatatttaaaaacattaaaaatcattttaaaaaatttatttatagaacaattaaataaatatttcagctaataaaaaacaaaagcttacctagccttagaagacaacttgtccaacaattagatgatacccattgcccttacgttttctttaacatcaattattgtttttgtcaacaagctatcttttagttttattttattggtaaaaaatatgtcgccttcaagttgcatcatttaacacatctcgtcattagaaaaataaaactcttccctaaacgattagtagaaaaaatcattcgataataaataagaaagaaaaattagaaaaaaataacttcattttaaaaaaatcattaaggctatattttttaaatgactaattttatatagactgtaactaaaagtatacaatttattatgctatgtatcttaaagaattacttataaaaatctacggaagaatatcttacaaagtgaaaaacaaatgagaaagaatttagtgggatgattatgattttatttgaaaattgaaaaaataattattaaagactttagtggagtaagaaagctttcctattagtcttttcttatccataaaaaaaaaaaaaaaaatctagcgtgacagcttttccatagattttaataatgtaaaatactggtagcagccgaccgttcaggtaatggacactgtggtcctaacttgcaacgggtgcgggcccaatttaataacgccgtggtaacggataaagccaagcgtgaagcggtgaaggtacatctctgactccgtcaagattacgaaaccgtcaactacgaaggactccccgaaatatcatctgtgtcataaacaccaagtcacaccatacatgggcacgcgtcacaatatgattggagaacggttccaccgcatatgctataaaatgcccccacacccctcgaccctaatcgcacttcaattgcaatcaaattagttcattctctttgcgcagttccctacctctcctttcaaggttcgtagatttcttccgtttttttttcttcttctttattgtttgttctacatcagcatgatgttgatttgattgtgttttctatcgtttcatcgattataaattttcataatcagaagattcagcttttattaatgcaagaacgtccttaattgatgattttataaccgtaaattaggtctaattagagtttttttcataaagattttcagatccgtttacaacaagccttaattgttgattctgtagtcgtagattaaggtttttttcatgaactacttcagatccgttaaacaacagccttatttgttgatacttcagtcgtttttcaagaaattgttcagatccgttgataaaagccttattcgttgattctgtatggtatttcaagagatattgctcaggtcctttagcaactaccttatttgttgattctgtggccatagattaggattttttttcacgaaattgcttcttgaaattacgtgatggattttgattctgatttatcttgtgattgttgactctacagatggcctcctccgagaacgtcatcaccgagttcatgcgcttcaaggtgcgcatggagggcaccgtgaacggccacgagttcgagatcgagggcgagggcgagggccgcccctacgagggccacaacaccgtgaagctgaaggtgacgaagggcggccccctgcccttcgcctgggacatcctgtccccccagttccagtacggctccaaggtgtacgtgaagcaccccgccgacatccccgactacaagaagctgtccttccccgagggcttcaagtgggagcgcgtgatgaacttcgaggacggcggcgtggcgaccgtgacccaggactcctccctgcaggacggctgcttcatctacaaggtgaagttcatcggcgtgaacttcccctccgacggccccgtgatgcagaagaagaccatgggctgggaggcctccaccgagcgcctgtacccccgcgacggcgtgctgaagggcgagacccacaaggccctgaagctgaaggacggcggccactacctggtggagttcaagtccatctacatggccaagaagcccgtgcagctgcccggctactactacgtggacgccaagctggacatcacctcccacaacgaggactacaccatcgtggagcagtacgagcgcaccgagggccgccaccacctgttcctgtagttttgtgatctgatgataagtggttggttcgtgtctcatgcacttgggaggtgatctatttcacctggtgtagtttgtgtttccgtcagttggaaaaacttatccctatcgatttcgttttcattttctgcttttcttttatgtaccttcgtttgggcttgtaacgggcctttgtatttcaactctcaataataatccaagtgcatgttaaacaatttgtcatctgtttcggctttgatatactactggtgaagatgggccgtactactgcatcacaacgaaaaataataataagatgaaaaacttgaagtggaaaaaaaaaaaacttgaatgttcactactactcattgaccataatgtttaacatacatagctcaatagtatttttgtgaatatggcaacacaaacagtccaaaacaattgtctcttactataccaaaccaagggcgccgcttgtttgccactctttgtgtgcaatagtgtgattaccacatctccacattcaatatattccctgaattatctgacgattttgatggctcactgttttcccaagtcttgaattgtcttctgtgcgccagtcaaatgcatatgtgttgagtttatcttttaaatatcaagcttttgtttttaacttttgtttgtaaccaaaaactcacagtaggagtttgatcacataattttatgtttgcctttgcaatttctagtgagtctttgattaaaagcttgaaaagaaaatgcagccaagcttaccaagtaagttatgtgtattaaccagaggaagagagaatcttgcaaaatttcaacaaacacaaaaagaagtattactacgattggtggagaaagaaaacgattccaaatcttgaactgttgttgtaaaagcatagcagaaagtgggagacaaccgaaatagaaatgactataacttaatttaatgttatcattataatttcttctagcaaatatttagaaagtaaatatcacatcaacctttaatgtaattaagctttctctttttgattcatgtgagatgaaaagaaaaaaaagaagagaaaagtgtagaaaacacatcatttctaagctgaagccacttacgcttgattccgatgacttcgtaggttcctagctcaagccgctcgtgtccaagcgtcacttacgattagctaatgattacggcatctaggaccgactagttcttatgtgcttctagtctccaaatgtggttgatagttattttgctctaagatcaacagtaatgaagtataaatcatcgttgtggtgtgctactcggttaattgagcattaacacacacaaacatgacgaggatggtataatctccaaaaatgtgtactttgttaggtgggaccctatagccttgattaatgtgctatgttaggcatgcctggaaacgtgtgacgcatatgttttgtgaacctgttgatattatatgtgcttttatattaccatattttattaaaatactaatatttattactagtaagatataacattctatctagcttaaaaactaaccataaatattccataataactagatttaccaaactaatatactaaatatacataataaatacaaaattaacaagacaataatcaatatttatgagcttaatatatttagacattatggttggtcgacgataatcatgctaacttttcgtaattgcttgattgaaatatgcttagaataatgcctctttgttctacatggcaaatagggaccattatggtgtaacaccctgggaaccacaaacaccccgaaatgctactaaactacacaactaaccttcatatataaaatttcgacagcatctcctttgaaaatttgcatagacgtggaagcaacagagtataaacagatctagctagctaagtttaaacggccggccaaacgtgcaagcgctactagacaattcagtacattaaaaacgtccgcaatgtgttattaagttgtctaagcgtcaatttatttacaattgaatatatcctgccaccagccagccaacagctccccgaccggcagctcggcacaaaatcaccactcgatacaggcagcccatcagtccgggacggcgtcagcgggagagccgttgtaaggcggcagactttgctcatgttaccgatgctattcggaagaacggcaactaagctgccgggtttgaaacacggatgatctcgcggagggtagcatgttgattgtaacgatgacagagcgttgctgcctgtgatcaaatatcatctccctcgcagagatccgaattatcagccttcttattcatttctcgcttaaccgtgacaggcgcgcgcggtgccacctgggtccttttcatcacgtgctataaaaataattataatttaaattttttaatataaatatataaattaaaaatagaaagtaaaaaaagaaattaaagaaaaaatagtttttgttttccgaagatgtaaaagactctagggggatcgccaacaaatactaccttttatcttgctcttcctgctctcaggtattaatgccgaattgtttcatcttgtctgtgtagaagaccacacacgaaaatcctgtgattttacattttacttatcgttaatcgaatgtatatctatttaatctgcttttcttgtctaataaatatatatgtaaagtacgctttttgttgaaattttttaaacctttgtttatttttttttcttcattccgtaactcttctaccttctttatttactttctaaaatccaaatacaaaacataaaaataaataaacacagagtaaattcccaaattattccatcattaaaagatacgaggcgcgtgtaagttacaggcaagcgatccgtcctaagaaaccattattatcatgacattaacctataaaaataggcgtatcacgaggccctttcgtctcgcgcgtttcggtgatgacggtgaaaacctctgacacatgcagctcccggagacggtcacagcttgtctgtaagcggatgccgggagcagacaagcccgtcagggcgcgtcagcgggtgttggcgggtgtcggggctggcttaactatgcggcatcagagcagattgtactgagagtgcaccataccacagcttttcaattcaattcatcattttttttttattcttttttttgatttcggtttctttgaaatttttttgattcggtaatctccgaacagaaggaagaacgaaggaaggagcacagacttagattggtatatatacgcatatgtagtgttgaagaaacatgaaattgcccagtattcttaacccaactgcacagaacaaaaacctgcaggaaacgaagataaatcatgtcgaaagctacatataaggaacgtgctgctactcatcctagtcctgttgctgccaagctatttaatatcatgcacgaaaagcaaacaaacttgtgtgcttcattggatgttcgtaccaccaaggaattactggagttagttgaagcattaggtcccaaaatttgtttactaaaaacacatgtggatatcttgactgatttttccatggagggcacagttaagccgctaaaggcattatccgccaagtacaattttttactcttcgaagacagaaaatttgctgacattggtaatacagtcaaattgcagtactctgcgggtgtatacagaatagcagaatgggcagacattacgaatgcacacggtgtggtgggcccaggtattgttagcggtttgaagcaggcggcagaagaagtaacaaaggaacctagaggccttttgatgttagcagaattgtcatgcaagggctccctatctactggagaatatactaagggtactgttgacattgcgaagagcgacaaagattttgttatcggctttattgctcaaagagacatgggtggaagagatgaaggttacgattggttgattatgacacccggtgtgggtttagatgacaagggagacgcattgggtcaacagtatagaaccgtggatgatgtggtctctacaggatctgacattattattgttggaagaggactatttgcaaagggaagggatgctaaggtagagggtgaacgttacagaaaagcaggctgggaagcatatttgagaagatgcggccagcaaaactaaaaaactgtattataagtaaacgcgcgcgggcgcgcctaaaacagcttgcgtcatgcggtcgctgcgtatatgatgcgatgagtaaataaacaaatacgcaaggggaacgcatgaaggttatcgctgtacttaaccagaaaggcgggtcaggcaagacgaccatcgcaacccatctagcccgcgccctgcaactcgccggggccgatgttctgttagtcgattccgatccccagggcagtgcccgcgattgggcggccgtgcgggaagatcaaccgctaaccgttgtcggcatcgaccgcccgacgattgaccgcgacgtgaaggccatcggccggcgcgacttcgtagtgatcgacggagcgccccaggcggcggacttggctgtgtccgcgatcaaggcagccgacttcgtgctgattccggtgcagccaagcccttacgacatatgggccaccgccgacctggtggagctggttaagcagcgcattgaggtcacggatggaaggctacaagcggcctttgtcgtgtcgcgggcgatcaaaggcacgcgcatcggcggtgaggttgccgaggcgctggccgggtacgagctgcccattcttgagtcccgtatcacgcagcgcgtgagctacccaggcactgccgccgccggcacaaccgttcttgaatcagaacccgagggcgacgctgcccgcgaggtccaggcgctggccgctgaaattaaatcaaaactcatttgagttaatgaggtaaagagaaaatgagcaaaagcacaaacacgctaagtgccggccgtccgagcgcacgcagcagcaaggctgcaacgttggccagcctcgcagacacgccagccatgaagcgggtcaactttcagttgccggcggaggatcacaccaagctgaagatgtacgcggtacgccaaggcaagaccattaccgagctgctatctgaatacatcgcgcagctaccagagtaaatgagcaaatgaataaatgagtagatgaattttagcggctaaaggaggcggcatggaaaatcaagaacaaccaggcaccgacgccgtggaatgccccatgtgtggaggaacgggcggttggccaggcgtaagcggctgggttgcctgccggccctgcaatggcactggaacccccaagcccgaggaatcggcgtgagcggtcgcaaaccatccggcccggtacaaatcggcgcggcgctgggtgatgacctggtggagaagttgaaggcagcgcaggccgcccagcggcaacgcatcgaggcagaagcacgccccggtgaatcgtggcaagcagccgctgatcgaatccgcaaagaatcccggcaaccgccggcagccggtgcgccgtcgattaggaagccgcccaagggcgacgagcaaccagattttttcgttccgatgctctatgacgtgggcacccgcgatagtcgcagcatcatggacgtggccgttttccgtctgtcgaagcgtgaccgacgagctggcgaggtgatccgctacgagcttccagacgggcacgtagaggtttccgcagggccggcaggcatggccagtgtgtgggattacgacctggtactgatggcggtttcccatctaaccgaatccatgaaccgataccgggaagggaagggagacaagcccggccgcgtgttccgtccacacgttgcggacgtactcaagttctgccggcgagccgatggcggaaagcagaaagacgacctggtagaaacctgcattcggttaaacaccacgcacgttgccatgcagcgtacgaagaaggccaagaacggccgcctggtgacggtatccgagggtgaagccttgattagccgctacaagatcgtaaagagcgaaaccgggcggccggagtacatcgagatcgagctagctgattggatgtaccgcgagatcacagaaggcaagaacccggacgtgctgacggttcaccccgattactttttgatcgatcccggcatcggccgttttctctaccgcctggcacgccgcgccgcaggcaaggcagaagccagatggttgttcaagacgatctacgaacgcagtggcagcgccggagagttcaagaagttctgtttcaccgtgcgcaagctgatcgggtcaaatgacctgccggagtacgatttgaaggaggaggcggggcaggctggcccgatcctagtcatgcgctaccgcaacctgatcgagggcgaagcatccgccggttcctaatgtacggagcagatgctagggcaaattgccctagcaggggaaaaaggtcgaaaaggtctctttcctgtggatagcacgtacattgggaacccaaagccgtacattgggaaccggaacccgtacattgggaacccaaagccgtacattgggaaccggtcacacatgtaagtgactgatataaaagagaaaaaaggcgatttttccgcctaaaactctttaaaacttattaaaactcttaaaacccgcctggcctgtgcataactgtctggccagcgcacagccgaagagctgcaaaaagcgcctacccttcggtcgctgcgctccctacgccccgccgcttcgcgtcggcctatggcgcgccggaaaatatgcatggcatgcccgttccatacagaagctgggcgaacaaacgatgctcgccttccagaaaaccgaggatgcgaaccacttcatccggggtcagcaccaccggcaagcgccgcgacggccgaggtcttccgatctcctgaagccagggcagatccgtgcacagcaccttgccgtagaagaacagcaaggccgccaatgcctgacgatgcgtggagaccgaaaccttgcgctcgttcgccagccaggacagaaatgcctcgacttcgctgctgcccaaggttgccgggtgacgcacaccgtggaaacggatgaaggcacgaacccagtggacataagcctgttcggttcgtaagctgtaatgcaagtagcgtatgcgctcacgcaactggtccagaaccttgaccgaacgcagcggtggtaacggcgcagtggcggttttcatggcttgttatgactgtttttttggggtacagtctatgcctcgggcatccaagcagcaagcgcgttacgccgtgggtcgatgtttgatgttatggagcagcaacgatgttacgcagcagggcagtcgccctaaaacaaagttaaacatcatgagggaagcggtgatcgccgaagtatcgactcaactatcagaggtagttggcgtcatcgagcgccatctcgaaccgacgttgctggccgtacatttgtacggctccgcagtggatggcggcctgaagccacacagtgatattgatttgctggttacggtgacggtaaggcttgatgaaacaacgcggcgagctttgatcaacgaccttttggaaacttcggcttcccctggagagagcgagattctccgcgctgtagaagtcaccattgttgtgcacgacgacatcattccgtggcgttatccagctaagcgcgaactgcaatttggagaatggcagcgcaatgacattcttgcaggtatcttcgagccagccacgatcgacattgatctggctatcttgctgacaaaagcaagagaacatagcgttgccttggtaggtccagcggcggaggaactctttgatccggttcctgaacaggatctatttgaggcgctaaatgaaaccttaacgctatggaactcgccgcccgactgggctggcgatgagcgaaatgtagtgcttacgttgtcccgcatttggtacagcgcagtaaccggcaaaatcgcgccgaaggatgtcgctgccgactgggcaatggagcgcctgccggcccagtatcagcccgtcatacttgaagctagacaggcttatcttggacaagaagaagatcgcttggcctcgcgcgcagatcagttggaagaatttgtccactacgtgaaaggcgagatcaccaaggtagtcggcaaataatgtctaacaattcgttcaagccgacgccgcttcgcggcgcggcttaactcaagcgttagatgcactatacgtaaccaactagtaggaacagtgaattggagttcgtcttgttataattagcttcttgggggatctttaaatactgtagaaaagaggaaggaaataataaatggctaaaatgagaatatcaccggaattgaaaaaactgatcgaaaaataccgctgcgtaaaagatacggaaggaatgtctcctgctaaggtatataagctggtgggagaaaatgaaaacctatatttaaaaatgacggacagccggtataaagggaccacctatgatgtggaacgggaaaaggacatgatgctatggctggaaggaaagctgcctgttccaaaggtcctgcactttgaacggcatgatggctggagcaatctgctcatgagtgaggccgatggcgtcctttgctcggaagagtatgaagatgaacaaagccctgaaaagattatcgagctgtatgcggagtgcatcaggctctttcactccatcgacatatcggattgtccctatacgaatagcttagacagccgcttagccgaattggattacttactgaataacgatctggccgatgtggattgcgaaaactgggaagaagacactccatttaaagatccgcgcgagctgtatgattttttaaagacggaaaagcccgaagaggaacttgtcttttcccacggcgacctgggagacagcaacatctttgtgaaagatggcaaagtaagtggctttattgatcttgggagaagcggcagggcggacaagtggtatgacattgccttctgcgtccggtcgatcagggaggatatcggggaagaacagtatgtcgagctattttttgacttactggggatcaagcctgattgggagaaaataaaatattatattttactggatgaattgttttagtacctagatacttcgctcgtgaaaagcagcgctcagggggctagtgcgctcttccgcttcctcgctcactgactcgctgcgctcggtcgttcggctgcggcgagcggtatcagctcactcaaaggcggtaatacggttatccacagaatcaggggataacgcaggaaagaacatgtgagcaaaaggccagcaaaaggccaggaaccgtaaaaaggccgcgttgctggcgtttttccataggctccgcccccctgacgagcatcacaaaaatcgacgctcaagtcagaggtggcgaaacccgacaggactataaagataccaggcgtttccccctggaagctccctcgtgcgctctcctgttccgaccctgccgcttaccggatacctgtccgcctttctcccttcgggaagcgtggcgctttctcatagctcacgctgtaggtatctcagttcggtgtaggtcgttcgctccaagctgggctgtgtgcacgaaccccccgttcagcccgaccgctgcgccttatccggtaactatcgtcttgagtccaacccggtaagacacgacttatcgccactggcagcagccactggtaacaggattagcagagcgaggtatgtaggcggtgctacagagttcttgaagtggtggcctaactacggctacactagaagaacagtatttggtatctgcgctctgctgaagccagttaccttcggaaaaagagttggtagctcttgatccggcaaacaaaccaccgctggtagcggtggtttttttgtttgcaagcagcagattacgcgcagaaaaaaaggatctcaagaagatcctttgatcttttctacggggtctgacgctcagtggaacgaaaactcacgttaagggattttggtcatgagattatcaaaaaggatcttcacctagatccttttaaattaaaaatgaagcgtacgttggaatcg

SEQ ID NO: 33 - DNA, 62 bp, Artificial Sequence
  Nucleotide sequence of FAD2-1A WT allele near GM-FAD2-1 CR1 site RV019927 experiment
gtggaagttcaagggaagaagcctctctcaagggttccaaacacaaagccaccattcactgt

SEQ ID NO: 34 - DNA, 55 bp, Artificial Sequence
  Nucleotide sequence of FAD2-1A edited allele of the 1.1 variant near GM-FAD2-1 CR1 site RV019927 experiment
gtggaagttcaagggaagaagcctctcttccaaacacaaagccaccattcactgt

SEQ ID NO: 35 - DNA, 60 bp, Artificial Sequence
  Nucleotide sequence of FAD2-1A edited allele of the 1.2 variant near GM-FAD2-1 CR1 site RV019927 experiment
gtggaagttcaagggaagaagcctctctagggttccaaacacaaagccaccattcactgt

SEQ ID NO: 36 - DNA, 57 bp, Artificial Sequence
  Nucleotide sequence of FAD2-1A edited allele of the 1.3 variant near GM-FAD2-1 CR1 site RV019927 experiment
gtggaagttcaagggaagaagcctctctgttccaaacacaaagccaccattcactgt

SEQ ID NO: 37 - DNA, 54 bp, Artificial Sequence
  Nucleotide sequence of FAD2-1A edited allele of the 1.4 variant near GM-FAD2-1 CR1 site RV019927 experiment
gtggaagttcaagggaagaagcctcgttccaaacacaaagccaccattcactgt

SEQ ID NO: 38 - DNA, 54 bp, Artificial Sequence; identical to SEQ ID NO: 37
  Nucleotide sequence of FAD2-1A edited allele of the 1.5 variant near GM-FAD2-1 CR1 site RV019927 experiment

SEQ ID NO: 39 - DNA, 58 bp, Artificial Sequence
  Nucleotide sequence of FAD2-1A edited allele of the 1.6 variant near GM-FAD2-1 CR1 site RV019927 experiment
gtggaagttcaagggaagaagcctctctggttccaaacacaaagccaccattcactgt

SEQ ID NO: 40 - DNA, 54 bp, Artificial Sequence
  Nucleotide sequence of FAD2-1A edited allele of the 1.7 variant near GM-FAD2-1 CR1 site RV019927 experiment
gtggaagttcaagggaagaagcctctctccaaacacaaagccaccattcactgt

SEQ ID NO: 41 - DNA, 55 bp, Artificial Sequence
  Nucleotide sequence of FAD2-1A edited allele of the 1.8 variant near GM-FAD2-1 CR1 site RV019927 experiment
gtggaagttcaagggaagaagcctctgttccaaacacaaagccaccattcactgt

SEQ ID NO: 42 - DNA, 62 bp, Artificial Sequence
  Nucleotide sequence of FAD2-1B WT allele near GM-FAD2-1 CR1 site RV019927 experiment
gttgaaattcagcagaagaagcctctctcaagggttccaaacacaaagccaccattcactgt

SEQ ID NO: 43 - DNA, 55 bp, Artificial Sequence
  Nucleotide sequence of FAD2-1B edited allele of the 1.1 variant near GM-FAD2-1 CR1 site RV019927 experiment
gttgaaattcagcagaagaagcctctcttccaaacacaaagccaccattcactgt

SEQ ID NO: 44 - DNA, 46 bp, Artificial Sequence
  Nucleotide sequence of FAD2-1B edited allele of the 1.2 variant near GM-FAD2-1 CR1 site RV019927 experiment
gttgaaattcagcagaagaagccaacacaaagccaccattcactgt

SEQ ID NO: 45 - DNA, 57 bp, Artificial Sequence
  Nucleotide sequence of FAD2-1B edited allele of the 1.3 variant near GM-FAD2-1 CR1 site RV019927 experiment
gttgaaattcagcagaagaagcctctctgttccaaacacaaagccaccattcactgt

SEQ ID NO: 46 - DNA, 58 bp, Artificial Sequence
  Nucleotide sequence of FAD2-1B edited allele of the 1.4 variant near GM-FAD2-1 CR1 site RV019927 experiment
gttgaaattcagcagaagaagcctctctggttccaaacacaaagccaccattcactgt

SEQ ID NO: 47 - DNA, 57 bp, Artificial Sequence
  Nucleotide sequence of FAD2-1B edited allele of the 1.5 variant near GM-FAD2-1 CR1 site RV019927 experiment
gttgaaattcagcagaagaagcctctcggttccaaacacaaagccaccattcactgt

SEQ ID NO: 48 - DNA, 54 bp, Artificial Sequence
  Nucleotide sequence of FAD2-1B edited allele of the 1.6 variant near GM-FAD2-1 CR1 site RV019927 experiment
gttgaaattcagcagaagaagcctctttccaaacacaaagccaccattcactgt

SEQ ID NO: 49 - DNA, 60 bp, Artificial Sequence
  Nucleotide sequence of FAD2-1B edited allele of the 1.7 variant near GM-FAD2-1 CR1 site RV019927 experiment
gttgaaattcagcagaagaagcctctcaagggttccaaacacaaagccaccattcactgt

SEQ ID NO: 50 - DNA, 55 bp, Artificial Sequence
  Nucleotide sequence of FAD2-1B edited allele of the 1.8 variant near GM-FAD2-1 CR1 site RV019927 experiment
gttgaaattcagcagaagaagccagggttccaaacacaaagccaccattcactgt

SEQ ID NO: 51 - DNA, 62 bp, Artificial Sequence; identical to SEQ ID NO: 33
  Nucleotide sequence of FAD2-1A WT allele near GM-FAD2-1 CR1 site RV019929 experiment

SEQ ID NO: 52 - DNA, 60 bp, Artificial Sequence; identical to SEQ ID NO: 35
  Nucleotide sequence of FAD2-1A edited allele of the 1.1 variant near GM-FAD2-1 CR1 site RV019929 experiment

SEQ ID NO: 53 - DNA, 54 bp, Artificial Sequence; identical to SEQ ID NO: 40
  Nucleotide sequence of FAD2-1A edited allele of the 1.2 variant near GM-FAD2-1 CR1 site RV019929 experiment

SEQ ID NO: 54 - DNA, 57 bp, Artificial Sequence; identical to SEQ ID NO: 36
  Nucleotide sequence of FAD2-1A edited allele of the 1.3 variant near GM-FAD2-1 CR1 site RV019929 experiment

SEQ ID NO: 55 - DNA, 55 bp, Artificial Sequence; identical to SEQ ID NO: 34
  Nucleotide sequence of FAD2-1A edited allele of the 1.4 variant near GM-FAD2-1 CR1 site RV019929 experiment

SEQ ID NO: 56 - DNA, 54 bp, Artificial Sequence
  Nucleotide sequence of FAD2-1A edited allele of the 1.5 variant near GM-FAD2-1 CR1 site RV019929 experiment
gtggaagttcaagggaagaagcctggttccaaacacaaagccaccattcactgt

SEQ ID NO: 57 - DNA, 57 bp, Artificial Sequence
  Nucleotide sequence of FAD2-1A edited allele of the 1.6 variant near GM-FAD2-1 CR1 site RV019929 experiment
gtggaagttcaagggaagaagcctctcggttccaaacacaaagccaccattcactgt

SEQ ID NO: 58 - DNA, 60 bp, Artificial Sequence
  Nucleotide sequence of FAD2-1A edited allele of the 1.7 variant near GM-FAD2-1 CR1 site RV019929 experiment
gtggaagttcaagggaagaagcctctcaagggttccaaacacaaagccaccattcactgt

SEQ ID NO: 59 - DNA, 52 bp, Artificial Sequence
  Nucleotide sequence of FAD2-1A edited allele of the 1.8 variant near GM-FAD2-1 CR1 site RV019929 experiment
gtggaagttcaagggaagaagcctctctaaacacaaagccaccattcactgt

SEQ ID NO: 60 - DNA, 62 bp, Artificial Sequence; identical to SEQ ID NO: 42
  Nucleotide sequence of FAD2-1B WT allele near GM-FAD2-1 CR1 site RV019929 experiment

SEQ ID NO: 61 - DNA, 55 bp, Artificial Sequence; identical to SEQ ID NO: 43
  Nucleotide sequence of FAD2-1B edited allele of the 1.1 variant near GM-FAD2-1 CR1 site RV019929 experiment

SEQ ID NO: 62 - DNA, 60 bp, Artificial Sequence; identical to SEQ ID NO: 49
  Nucleotide sequence of FAD2-1B edited allele of the 1.2 variant near GM-FAD2-1 CR1 site RV019929 experiment

SEQ ID NO: 63 - DNA, 57 bp, Artificial Sequence; identical to SEQ ID NO: 45
  Nucleotide sequence of FAD2-1B edited allele of the 1.3 variant near GM-FAD2-1 CR1 site RV019929 experiment

SEQ ID NO: 64 - DNA, 51 bp, Artificial Sequence
  Nucleotide sequence of FAD2-1B edited allele of the 1.4 variant near GM-FAD2-1 CR1 site RV019929 experiment
gttgaaattcagcagaagaagcctctcaaacacaaagccaccattcactgt

SEQ ID NO: 65 - DNA, 54 bp, Artificial Sequence
  Nucleotide sequence of FAD2-1B edited allele of the 1.5 variant near GM-FAD2-1 CR1 site RV019929 experiment
gttgaaattcagcagaagaagcctctctccaaacacaaagccaccattcactgt

SEQ ID NO: 66 - DNA, 49 bp, Artificial Sequence
  Nucleotide sequence of FAD2-1B edited allele of the 1.6 variant near GM-FAD2-1 CR1 site RV019929 experiment
gttgaaattcagcagaagaagttccaaacacaaagccaccattcactgt

SEQ ID NO: 67 - DNA, 57 bp, Artificial Sequence
  Nucleotide sequence of FAD2-1B edited allele of the 1.7 variant near GM-FAD2-1 CR1 site RV019929 experiment
gttgaaattcagcagaagaagctcaagggttccaaacacaaagccaccattcactgt

SEQ ID NO: 68 - DNA, 58 bp, Artificial Sequence; identical to SEQ ID NO: 46
  Nucleotide sequence of FAD2-1B edited allele of the 1.8 variant near GM-FAD2-1 CR1 site RV019929 experiment

SEQ ID NO: 69 - DNA, 62 bp, Artificial Sequence
  Nucleotide sequence of FAD3a WT allele near GM-FAD3 CR2 site RV019929 experiment
gctgggtcaagaatccatggagatccctcagttatgttctcagggatgtgcttgtaattgct

SEQ ID NO: 70 - DNA, 60 bp, Artificial Sequence
  Nucleotide sequence of FAD3a edited allele of the 1.1 variant near GM-FAD3 CR2 site RV019929 experiment
gctgggtcaagaatccatggatccctcagttatgttctcagggatgtgcttgtaattgct

SEQ ID NO: 71 - DNA, 58 bp, Artificial Sequence
  Nucleotide sequence of FAD3a edited allele of the 1.2 variant near GM-FAD3 CR2 site RV019929 experiment
gctgggtcaagaatccatggccctcagttatgttctcagggatgtgcttgtaattgct

SEQ ID NO: 72 - DNA, 57 bp, Artificial Sequence
  Nucleotide sequence of FAD3a edited allele of the 1.3 variant near GM-FAD3 CR2 site RV019929 experiment
gctgggtcaagaatccatggcctcagttatgttctcagggatgtgcttgtaattgct

SEQ ID NO: 73 - DNA, 55 bp, Artificial Sequence
  Nucleotide sequence of FAD3a edited allele of the 1.4 variant near GM-FAD3 CR2 site RV019929 experiment
gctgggtcaagaatccatcctcagttatgttctcagggatgtgcttgtaattgct

SEQ ID NO: 74 - DNA, 58 bp, Artificial Sequence
  Nucleotide sequence of FAD3a edited allele of the 1.5 variant near GM-FAD3 CR2 site RV019929 experiment
gctgggtcaagaatccatggacctcagttatgttctcagggatgtgcttgtaattgct

SEQ ID NO: 75 - DNA, 61 bp, Artificial Sequence
  Nucleotide sequence of FAD3a edited allele of the 1.6 variant near GM-FAD3 CR2 site RV019929 experiment
gctgggtcaagaatccatggaatccctcagttatgttctcagggatgtgcttgtaattgct

SEQ ID NO: 76 - DNA, 62 bp, Artificial Sequence; identical to SEQ ID NO: 69
  Nucleotide sequence of FAD3b WT allele near GM-FAD3 CR2 site RV019929 experiment

SEQ ID NO: 77 - DNA, 60 bp, Artificial Sequence; identical to SEQ ID NO: 70
  Nucleotide sequence of FAD3b edited allele of the 1.1 variant near GM-FAD3 CR2 site RV019929 experiment

SEQ ID NO: 78 - DNA, 58 bp, Artificial Sequence; identical to SEQ ID NO: 74
  Nucleotide sequence of FAD3b edited allele of the 1.2 variant near GM-FAD3 CR2 site RV019929 experiment

SEQ ID NO: 79 - DNA, 51 bp, Artificial Sequence
  Nucleotide sequence of FAD3b edited allele of the 1.3 variant near GM-FAD3 CR2 site RV019929 experiment
gctgggtcaagaatccatggatatgttctcagggatgtgcttgtaattgct

SEQ ID NO: 80 - DNA, 60 bp, Artificial Sequence
  Nucleotide sequence of FAD3b edited allele of the 1.4 variant near GM-FAD3 CR2 site RV019929 experiment
gctgggtcaagaatccatagatccctcagttatgttctcagggatgtgcttgtaattgct

SEQ ID NO: 81 - DNA, 58 bp, Artificial Sequence; identical to SEQ ID NO: 71
  Nucleotide sequence of FAD3b edited allele of the 1.5 variant near GM-FAD3 CR2 site RV019929 experiment

SEQ ID NO: 82 - DNA, 55 bp, Artificial Sequence
  Nucleotide sequence of FAD3b edited allele of the 1.6 variant near GM-FAD3 CR2 site RV019929 experiment
gctgggtcaagaatccatggacagttatgttctcagggatgtgcttgtaattgct

SEQ ID NO: 83 - DNA, 57 bp, Artificial Sequence; identical to SEQ ID NO: 72
  Nucleotide sequence of FAD3b edited allele of the 1.7 variant near GM-FAD3 CR2 site RV019929 experiment

SEQ ID NO: 84 - DNA, 55 bp, Artificial Sequence; identical to SEQ ID NO: 73
  Nucleotide sequence of FAD3b edited allele of the 1.8 variant near GM-FAD3 CR2 site RV019929 experiment

SEQ ID NO: 85 - DNA, 1331 bp, Glycine max
atggtcatgatttcactctctctaatctctccattcattttgtagttgtcattatctttagatttttcactacctggtttaaaattgagggattgtagttctgttggtacatattacacattcagcaaaacaactgaaactcaactgaacttgtttatactttgacacagggtctagcaaaggaaacaacaatgggaggtagaggtcgtgtggccaaagtggaagttcaagggaagaagcctctctcaagggttccaaacacaaagccaccattcactgttggccaactcaagaaagcaattccaccacactgctttcagcgctccctcctcacttcattctcctatgttgtttatgacctttcatttgccttcattttctacattgccaccacctacttccacctccttcctcaacccttttccctcattgcatggccaatctattgggttctccaaggttgccttctcactggtgtgtgggtgattgctcacgagtgtggtcaccatgccttcagcaagtaccaatgggttgatgatgttgtgggtttgacccttcactcaacacttttagtcccttatttctcatggaaaataagccatcgccgccatcactccaacacaggttcccttgaccgtgatgaagtgtttgtcccaaaaccaaaatccaaagttgcatggttttccaagtacttaaacaaccctctaggaagggctgtttctcttctcgtcacactcacaatagggtggcctatgtatttagccttcaatgtctctggtagaccctatgatagttttgcaagccactaccacccttatgctcccatatattctaaccgtgagaggcttctgatctatgtctctgatgttgctttgttttctgtgacttactctctctaccgtgttgcaaccctgaaagggttggtttggctgctatgtgtttatggggtgcctttgctcattgtgaacggttttcttgtgactatcacatatttgcagcacacacactttgccttgcctcattacgattcatcagaatgggactggctgaagggagctttggcaactatggacagagattatgggattctgaacaaggtgtttcatcacataactgatactcatgtggctcaccatctcttctctacaatgccacattaccatgcaatggaggcaaccaatgcaatcaagccaatattgggtgagtactaccaatttgatgacacaccattttacaaggcactgtggagagaagcgagagagtgcctctatgtggagccagatgaaggaacatccgagaagggcgtgtattggtacaggaacaagtattga

SEQ ID NO: 86 - DNA, 1324 bp, Glycine max
atggtcatgatttcactctctctaatctgtcacttccctccattcattttgtacttctcatatttttcacttcctggttgaaaattgtagttctcttggtacatactagtattagacattcagcaacaacaactgaactgaacttctttatactttgacacagggtctagcaaaggaaacaataatgggaggtggaggccgtgtggccaaagttgaaattcagcagaagaagcctctctcaagggttccaaacacaaagccaccattcactgttggccaactcaagaaagccattccaccgcactgctttcagcgttccctcctcacttcattgtcctatgttgtttatgacctttcattggctttcattttctacattgccaccacctacttccacctcctccctcaccccttttccctcattgcatggccaatctattgggttctccaaggttgcattcttactggcgtgtgggtgattgctcacgagtgtggtcaccatgccttcagcaagtacccatgggttgatgatgttatgggtttgaccgttcactcagcacttttagtcccttatttctcatggaaaataagccatcgccgccaccactccaacacgggttcccttgaccgtgatgaagtgtttgtcccaaaaccaaaatccaaagttgcatggtacaccaagtacctgaacaaccctctaggaagggctgcttctcttctcatcacactcacaatagggtggcctttgtatttagccttcaatgtctctggcagaccctatgatggttttgctagccactaccacccttatgctcccatatattcaaatcgtgagaggcttttgatctatgtctctgatgttgctttgttttctgtgacttacttgctctaccgtgttgcaactatgaaagggttggtttggctgctatgtgtttatggggtgccattgctcattgtgaacggttttcttgtgaccatcacatatctgcagcacacacactatgccttgcctcactatgattcatcagaatgggattggctgaggggtgctttggcaactatggacagagattatggaattctgaacaaggtgtttcaccacataactgatactcatgtggctcaccatcttttctctacaatgccacattaccatgcaacggaggcaaccaatgcaatgaagccaatattgggtgagtactaccgatttgatgacacaccattttacaaggcactgtggagagaagcaagagagtgcctctatgtggagccagatgaaggaacatccgagaagggcgtgtattggtacaggaacaagtattga

SEQ ID NO: 87 - DNA, 3868 bp, Glycine max
atggttaaagacacaaagcctttagcctatgctgctaataatggataccaaaaggaagcttttgatcccagtgctcctccaccgtttaagattgcagaaatcagagttgcaataccaaaacattgctgggtcaagaatccatggagatccctcagttatgttctcagggatgtgcttgtaattgctgcattgatggctgctgcaagtcacttcaacaactggcttctctggctaatctattggcccattcaaggaacaatgttctgggctctgtttgttcttggacatgattggtaattaattaatttgttgttacttttttgttataatatgaatctcacacactgctttgttatgcctacctcatttcatttggctttagacaacttaaatttgagatctttattatgttttttgcttatatggtaaagtgattcattcttcacattgaattgaacagtggccatggaagcttttcagacagcccttttctaaatagcctggtgggacacatcttgcattcctcaattcttgtgccataccatggatggttagttcatcccggcttttttgtttgtcattggaagttcttttattgattcaatttttatagcgtgttcggaaacgcgtttcagaaaataatgaaatacatcttgaatctgaaagttataacttttagcttcattgtcattgaaagttcttttattaattatatttttattgcgtgtttggaatcccatttgagaaataagaaatcacgtttaaaatgtgaaagttataactattaacttttgactaaacttgaaaaaatcacatttttgatgtggaaccaaatctgatttgagaaccaagttgattttgatggattttgcaggagaattagccacagaactcaccatcaaaatcatggacacattgagaaggatgaatcctgggttccagtatgtgattaactacttcctctatagttatttttgattcaattaaatttatttatttaataagttcaagaaaaaaggaatctttatacttcagataaagctgttcttgaacatttttttttgtcattatcttagttaaccgagaagatttacaagaatctagacaacatgacaagacttgttagattcactgtgccatttccattgtttgtgtatccaatttatttggtgagtgcttttttttttttacttggaagactacaacacattattattattataatatggttcaaatcaatgacttttaatttctttgtgatgtgcactccattttcagttctcaagaagccccggaaaggaaggttctcacttcaatccctacagcaatctgttcccacccagtgagagaaagggaatagcaatatcaacactgtgttgggttaccatgttttctatgcttatctatctctccttcataactagtccagttctattgctcaagctctatggaattccatattgggtaattaaattactcttacattactttttcctctttttttttatgggtcttaactagtatcacaaaaatattggttaaaaaattttaaaaaaatatttattatgtaaatcataaaagaacataaaaaaaatgatgaataacataattttcgtctcttattaaaaatatttttattttaaatttcttaatcaatatatttagaatctggttaacattttttgaatatttcaattctccaattaaaaatttgaaatagtcaccattaattatgtaattgtttgaacacgtgcagatatttgttatgtggctggactttgtcacatacttgcatcaccatggtcatcatcagaaactgccttggtatcgcggcaaggtaacaaaaataaatagaaaatagtgagtgaacacttaaatgttagatactaccttcttcttcttttttttttttttttgaggttaatgctagataatagctagaaagagaaagaaagacaaatataggtaaaaataaataatataacctgggaagaagaaaacataaaaaaagaaataatagagtctacgtaatgtttggatttttgagtgaaatggtgttcacctaccattactcaaagattctgttgtctacgtagtgtttggactttggagtgaaatggtgttcacctaccattactcagattctgttgtgtcccttagttactgtcttatattcttagggtatattctttattttacatccttttcacatcttacttgaaaagatttttaattattcattgaaatattaacgtgacagttaaattaaaataataaaaaattcgttaaaacttcaaataaataagagtgaaaggatcatcatttttcttctttcttttattgcgttattaatcatgcttctcttcttttttttcttcgctttccacccatatcaaattcatgtgaagtatgagaaaatcacgattcaatggaaagctacaggaactttttttgttttgtttttataatcggaattaatttatactccattttttcacaataaatgttacttagtgccttaaagataatatttgaaaaattaaaaaaattattaatacactgtactactatataatatttgacatatatttaacatgattttctattgaaaatttgtatttattattttttaatcaaaacccataaggcattaatttacaagacccatttttcatttatagctttacctgtgatcatttatagctttaagggacttagatgttacaatcttaattacaagtaaatatttatgaaaaacatgtgtcttaccccttaaccttacctcaacaaagaaagtgtgataagtggcaacacacgtgttgcttttttggcccagcaataacacgtgtttttgtggtgtacaaaaatggacaggaatggagttatttaagaggtggtctcacaactgtggatcgtgactatggttggatcaataacattcaccatgacattggcacccatgttattcaccatcttttccctcaaattcctcattatcacctcgttgaagcggtatattttactattattactcacctaaaaagaatgcaattagtacatttgttttatctcttggaagttagtcattttcagttgcatgattgtaatgttctctctatttttaaaccatgttttcacacctacttcgtttaaaataagaatgtggatactattctaatttctattaacttcttttaaaaaataatgtaaaactagtattaaaaaagaggaaatagattacactctactaatactaatagtataaaaaaaattacattgttattttatcacaaataattatatataattaatttttacaatcattatcttaaaagtcatgtatgatatacagtttttacatgctttggtacttattgtaaagttagtgatttattcattatttatgttatataattggcataaatatcatgtaaccagctcactatactataatgggaacttggtggtgaaaggggtttacaaccctcttttctaggtgtaggtgctttgatacttctggtccctttttatatcaatataaattatattttgctgataaaaaaaacattattaatatataatcattaacttctttaaaaaccgtacctaaaactttatattattaaaaagaagattgagatcagcaaaagaaaaaaaaattaacagtcatttgaattcactgcagacacaagcagcaaaatcagttcttggagagtattaccgtgagccagaaagatctgcaccattaccatttcatctaataaagtatttaattcagagtatgagacaagaccacttcgtaagtgacactggagatgtggtttattatcagactgattctctgcaccttcactcgcaccgagactga

SEQ ID NO: 88 - DNA, 3896 bp, Glycine max
atggttaaagacacaaagcctttagcctatgctgccaataatggataccaacaaaagggttcttcttttgattttgatcctagcgctcctccaccgtttaagattgcagaaatcagagcttcaataccaaaacattgctgggtcaagaatccatggagatccctcagttatgttctcagggatgtgcttgtaattgctgcattggtggctgcagcaattcacttcgacaactggcttctctggctaatctattgccccattcaaggcacaatgttctgggctctctttgttcttggacatgattggtaataatttttgtgtttcttactcttttttttttttttttgtttatgatatgaatctcacacattgttctgttatgtcatttcttcttcatttggctttagacaacttaaatttgagatctttattatgtttttgcttatatggtaaagtgattcttcattatttcattcttcattgattgaattgaacagtggccatggaagcttttcagatagccctttgctgaatagcctggtgggacacatcttgcattcctcaattcttgtgccataccatggatggttagttcatactggcttttttgtttgttcatttgtcattgaaaaaaaatcttttgttgattcaattatttttatagtgtgtttggaagcccgtttgagaaaataagaaatcgcatctggaatgtgaaagttataactatttagcttcatctgtcgttgcaagttcttttattggttaaatttttatagcgtgctaggaaacccattcgagaaaataagaaatcacatctggaatgtgaaagttataactgttagcttctgagtaaacgtggaaaaaccacattttggatttggaaccaaattttatttgataaatgacaaccaaattgattttgatggattttgcaggagaattagccacagaactcaccatcaaaaccatggacacattgagaaggatgagtcatgggttccagtatgtgattaattgcttctcctatagttgttcttgattcaattacattttatttatttggtaggtccaagaaaaaagggaatctttatgcttcctgaggctgttcttgaacatggctcttttttatgtgtcattatcttagttaacagagaagatttacaagaatctagacagcatgacaagactcattagattcactgtgccatttccattgtttgtgtatccaatttatttggtgagtgattttttgacttggaagacaacaacacattattattataatatggttcaaaacaatgactttttctttatgatgtgaactccattttttagttttcaagaagccccggaaaggaaggctctcacttcaatccctacagcaatctgtttccacccagtgagagaaaaggaatagcaatatcaacactgtgttgggctaccatgttttctctgcttatctatctctcattcataactagtccacttctagtgctcaagctctatggaattccatattgggtaactaaattactcctacattgttactttttcctccttttttttattatttcaattctccaattggaaatttgaaatagttaccataattatgtaattgtttgatcatgtgcagatatttgttatgtggctggactttgtcacatacttgcatcaccatggtcaccaccagaaactgccttggtaccgcggcaaggtaacaaaaataaatagaaaatagtgggtgaacacttaaatgcgagatagtaatacctaaaaaaagaaaaaaatataggtataataaataatataactttcaaaataaaaagaaatcatagagtctagcgtagtgtttggagtgaaatgatgttcacctaccattactcaaagattttgttgtgtcccttagttcattcttattattttacatatcttacttgaaaagactttttaattattcattgagatcttaaagtgactgttaaattaaaataaaaaacaagtttgttaaaacttcaaataaataagagtgaagggagtgtcatttgtcttctttcttttattgcgttattaatcacgtttctcttctctttttttttttttcttctctgctttccacccattatcaagttcatgtgaagcagtggcggatctatgtaaatgagtggggggcaattgcacccacaagattttattttttatttgtacaggaataataaaataaaactttgcccccataaaaaataaatattttttcttaaaataatgcaaaataaatataagaaataaaaagagaataaattattattaattttattattttgtactttttatttagtttttttagcggttagatttttttttcatgacattatgtaatcttttaaaagcatgtaatatttttattttgtgaaaataaatataaatgatcatattagtctcagaatgtataaactaataataattttatcactaaaagaaattctaatttagtccataaataagtaaaacaagtgacaattatattttatatttacttaatgtgaaataatacttgaacattataataaaacttaatgacaggagatattacatagtgccataaagatattttaaaaaataaaatcattaatacactgtactactatataatattcgatatatatttttaacatgattctcaatagaaaaattgtattgattatattttattagacatgaatttacaagccccgtttttcatttatagctcttacctgtgatctattgttttgcttcgctgtttttgttggtcaagggacttagatgtcacaatattaatactagaagtaaatatttatgaaaacatgtaccttacctcaacaaagaaagtgtggtaagtggcaacacacgtgttgcatttttggcccagcaataacacgtgtttttgtggtgtactaaaatggacaggaatggagttatttaagaggtggcctcaccactgtggatcgtgactatggttggatcaataacattcaccatgacattggcacccatgttatccaccatcttttcccccaaattcctcattatcacctcgttgaagcggtacattttattgcttattcacctaaaaacaatacaattagtacatttgttttatctcttggaagttagtcattttcagttgcatgattctaatgctctctccattcttaaatcatgttttcacacccacttcatttaaaataagaacgtgggtgttattttaatttctattcactaacatgagaaattaacttatttcaagtaataattttaaaatatttttatgctattattttattacaaataattatgtatattaagtttattgattttataataattatattaaaattatatcgatattaatttttgattcactgatagtgttttatattgttagtactgtgcatttattttaaaattggcataaataatatatgtaaccagctcactatactatactgggagcttggtggtgaaaggggttcccaaccctcctttctaggtgtacatgctttgatacttctggtaccttcttatatcaatataaattatattttgctgataaaaaaacatggttaaccattaaattctttttttaaaaaaaaaactgtatctaaactttgtattattaaaaagaagtctgagattaacaataaactaacactcatttgaattcactgcagacacaagcagcaaaaccagttcttggagattactaccgtgagccagaaagatctgcgccattaccatttcatctaataaagtatttaattcagagtatgagacaagaccacttcgtaagtgacactggagatgttgtttattatcagactgattctctgctcctccactcgcaacgagactga

SEQ ID NO: 89 - DNA, 1164 bp, Glycine max
atgggtctagcaaaggaaacaacaatgggaggtagaggtcgtgtggccaaagtggaagttcaagggaagaagcctctctcaagggttccaaacacaaagccaccattcactgttggccaactcaagaaagcaattccaccacactgctttcagcgctccctcctcacttcattctcctatgttgtttatgacctttcatttgccttcattttctacattgccaccacctacttccacctccttcctcaacccttttccctcattgcatggccaatctattgggttctccaaggttgccttctcactggtgtgtgggtgattgctcacgagtgtggtcaccatgccttcagcaagtaccaatgggttgatgatgttgtgggtttgacccttcactcaacacttttagtcccttatttctcatggaaaataagccatcgccgccatcactccaacacaggttcccttgaccgtgatgaagtgtttgtcccaaaaccaaaatccaaagttgcatggttttccaagtacttaaacaaccctctaggaagggctgtttctcttctcgtcacactcacaatagggtggcctatgtatttagccttcaatgtctctggtagaccctatgatagttttgcaagccactaccacccttatgctcccatatattctaaccgtgagaggcttctgatctatgtctctgatgttgctttgttttctgtgacttactctctctaccgtgttgcaaccctgaaagggttggtttggctgctatgtgtttatggggtgcctttgctcattgtgaacggttttcttgtgactatcacatatttgcagcacacacactttgccttgcctcattacgattcatcagaatgggactggctgaagggagctttggcaactatggacagagattatgggattctgaacaaggtgtttcatcacataactgatactcatgtggctcaccatctcttctctacaatgccacattaccatgcaatggaggcaaccaatgcaatcaagccaatattgggtgagtactaccaatttgatgacacaccattttacaaggcactgtggagagaagcgagagagtgcctctatgtggagccagatgaaggaacatccgagaagggcgtgtattggtacaggaacaagtattga

SEQ ID NO: 90 - protein, 386 aa, Glycine max
MGLAKETTMGGRGRVAKVEVQGKKPLSRVPNTKPPFTVGQLKKAIPPHCFQRSLLTSFSYVVYDLSFAFIFYIATTYFHLLPQPFSLIAWPIYWVLQGCLLTGVWVIAHECGHHAFSKYQWVDDVVGLTLHSTLLVPYFSWKISHRRHHSNTGSLDRDEVFVPKPKSKVAWFSKYLNNPLGRAVSLLVTLTIGWPMYLAFNVSGRPYDSFASHYHPYAPIYSNRERLLIYVSDVALFSVTYSLYRVATLKGLVWLLCVYGVPLLIVNGFLVTITYLQHTHFALPHYDSSEWDWLKGALATMDRDYGILNKVFHHITDTVAHHLFSTMPHYHAMEATNAIKPILGEYYQFDDTPFYKALWREARECLYVEPDEGTSEKGVYWYRNKY

SEQ ID NO: 91 - DNA, 1164 bp, Glycine max
atgggtctagcaaaggaaacaataatgggaggtggaggccgtgtggccaaagttgaaattcagcagaagaagcctctctcaagggttccaaacacaaagccaccattcactgttggccaactcaagaaagccattccaccgcactgctttcagcgttccctcctcacttcattgtcctatgttgtttatgacctttcattggctttcattttctacattgccaccacctacttccacctcctccctcaccccttttccctcattgcatggccaatctattgggttctccaaggttgcattcttactggcgtgtgggtgattgctcacgagtgtggtcaccatgccttcagcaagtacccatgggttgatgatgttatgggtttgaccgttcactcagcacttttagtcccttatttctcatggaaaataagccatcgccgccaccactccaacacgggttcccttgaccgtgatgaagtgtttgtcccaaaaccaaaatccaaagttgcatggtacaccaagtacctgaacaaccctctaggaagggctgcttctcttctcatcacactcacaatagggtggcctttgtatttagccttcaatgtctctggcagaccctatgatggttttgctagccactaccacccttatgctcccatatattcaaatcgtgagaggcttttgatctatgtctctgatgttgctttgttttctgtgacttacttgctctaccgtgttgcaactatgaaagggttggtttggctgctatgtgtttatggggtgccattgctcattgtgaacggttttcttgtgaccatcacatatctgcagcacacacactatgccttgcctcactatgattcatcagaatgggattggctgaggggtgctttggcaactatggacagagattatggaattctgaacaaggtgtttcaccacataactgatactcatgtggctcaccatcttttctctacaatgccacattaccatgcaacggaggcaaccaatgcaatgaagccaatattgggtgagtactaccgatttgatgacacaccattttacaaggcactgtggagagaagcaagagagtgcctctatgtggagccagatgaaggaacatccgagaagggcgtgtattggtacaggaacaagtattga

SEQ ID NO: 92 - protein, 386 aa, Glycine max
MGLAKETIMGGGGRVAKVEIQQKKPLSRVPNTKPPFTVGQLKKAIPPHCFQRSLLTSLSYVVYDLSLAFIFYIATTYFHLLPHPFSLIAWPIYWVLQGCILTGVWVIAHECGHHAFSKYPWVDDVMGLTVHSALLVPYFSWKISHRRHHSNTGSLDRDVFVPKPKSKVAWYTKYLNNPLGRAASLLITLTIGWPLYLAFNVSGRPYDGFASHYHPYAPIYSNRERLLIYVSDVALFSVTYLLYRVATMKGLVWLLCVYGVPLLIVNGFLVTITYLQHTHYALPHYDSSEWDWLRGALATMDRDYGILNKVFHHITDTHVAHHLFSTMPHYHATEATNAMKPILGEYYRFDDTPFYKALWREARECLYVEPDEGTSEKGVYWYRNKY

SEQ ID NO: 93 - DNA, 1131 bp, Glycine max
atggttaaagacacaaagcctttagcctatgctgctaataatggataccaaaaggaagcttttgatcccagtgctcctccaccgtttaagattgcagaaatcagagttgcaataccaaaacattgctgggtcaagaatccatggagatccctcagttatgttctcagggatgtgcttgtaattgctgcattgatggctgctgcaagtcacttcaacaactggcttctctggctaatctattggcccattcaaggaacaatgttctgggctctgtttgttcttggacatgattgtggccatggaagcttttcagacagcccttttctaaatagcctggtgggacacatcttgcattcctcaattcttgtgccataccatggatggagaattagccacagaactcaccatcaaaatcatggacacattgagaaggatgaatcctgggttccattaaccgagaagatttacaagaatctagacaacatgacaagacttgttagattcactgtgccatttccattgtttgtgtatccaatttatttgttctcaagaagccccggaaaggaaggttctcacttcaatccctacagcaatctgttcccacccagtgagagaaagggaatagcaatatcaacactgtgttgggttaccatgttttctatgcttatctatctctccttcataactagtccagttctattgctcaagctctatggaattccatattggatatttgttatgtggctggactttgtcacatacttgcatcaccatggtcatcatcagaaactgccttggtatcgcggcaaggaatggagttatttaagaggtggtctcacaactgtggatcgtgactatggttggatcaataacattcaccatgacattggcacccatgttattcaccatcttttccctcaaattcctcattatcacctcgttgaagcgacacaagcagcaaaatcagttcttggagagtattaccgtgagccagaaagatctgcaccattaccatttcatctaataaagtatttaattcagagtatgagacaagaccacttcgtaagtgacactggagatgtggtttattatcagactgattctctgcaccttcactcgcaccgagactga

SEQ ID NO: 94 - protein, 376 aa, Glycine max
MVKDTKPLAYAANNGYQKEAFDPSAPPPFKIAEIRVAIPKHCWVKNPWRSLSYVLRDVLVIAALMAAASHFNNWLLWLIYWPIQGTMFWALFVLGHDCGHGSFSDSPFLNSLVGHILHSSILVPYHGWRISHRTHHQNHGHIEKDESWVPLTEKIYKNLDNMTRLVRFTVPFPLFVYPIYLFSRSPGKEGSHFNPYSNLFPPSERKGIAISTLCWVTMFSMLIYLSFITSPVLLLKLYGIPYWIFVMWLDFVTYLHHHGHHQKLPWYRGKEWSYLRGGLTTVDRDYGWINNIHHDIGTHVIHHLFPQIPHYHLVEATQAAKSVLGEYYREPERSAPLPFHLIKYLIQSMRQDHFVSDTGDVVYYQTDSLHLHSHRD

SEQ ID NO: 95 - DNA, 1143 bp, Glycine max
atggttaaagacacaaagcctttagcctatgctgccaataatggataccaacaaaagggttcttcttttgattttgatcctagcgctcctccaccgtttaagattgcagaaatcagagcttcaataccaaaacattgctgggtcaagaatccatggagatccctcagttatgttctcagggatgtgcttgtaattgctgcattggtggctgcagcaattcacttcgacaactggcttctctggctaatctattgccccattcaaggcacaatgttctgggctctctttgttcttggacatgattgtggccatggaagcttttcagatagccctttgctgaatagcctggtgggacacatcttgcattcctcaattcttgtgccataccatggatggagaattagccacagaactcaccatcaaaaccatggacacattgagaaggatgagtcatgggttccattaacagagaagatttacaagaatctagacagcatgacaagactcattagattcactgtgccatttccattgtttgtgtatccaatttatttgttttcaagaagccccggaaaggaaggctctcacttcaatccctacagcaatctgtttccacccagtgagagaaaaggaatagcaatatcaacactgtgttgggctaccatgttttctctgcttatctatctctcattcataactagtccacttctagtgctcaagctctatggaattccatattggatatttgttatgtggctggactttgtcacatacttgcatcaccatggtcaccaccagaaactgccttggtaccgcggcaaggaatggagttatttaagaggtggcctcaccactgtggatcgtgactatggttggatcaataacattcaccatgacattggcacccatgttatccaccatcttttcccccaaattcctcattatcacctcgttgaagcgacacaagcagcaaaaccagttcttggagattactaccgtgagccagaaagatctgcgccattaccatttcatctaataaagtatttaattcagagtatgagacaagaccacttcgtaagtgacactggagatgttgtttattatcagactgattctctgctcctccactcgcaacgagactga

SEQ ID NO: 96 - protein, 380 aa, Glycine max
MVKDTKPLAYAANNGYQQKGSSFDFDPSAPPPFKIAEIRASIPKHCWVKNPWRSLSYVLRDVLVIAALVAAAIHFDNWLLWLIYCPIQGTMFWALFVLGHDCGHGSFSDSPLLNSLVGHILHSSILVPYHGWRISHRTHHQNHGHIEKDESWVPLTEKIYKNLDSMTRLIRFTVPFPLFVYPIYLFSRSPGKEGSHFNPYSNLFPPSERKGIAISTLCWATMFSLLIYLSFITSPLLVLKLYGIPYWIFVMWLDFVTYLHHHGHHQKLPWYRGKEWSYLRGGLTTVDRDYGWINNIHHDIGTHVIHHLFPQIPHYHLVEATQAAKPVLGDYYREPERSAPLPFHLIKYLIQSMRQDHFVSDTGDVVYYQTDSLLLHSQRD

SEQ ID NO: 97 - DNA, 26760 bp, Artificial Sequence
  Nucleotide sequence of Vector 9
ctcacagaaacaatcaaacaaacatacacagcgatttattcacacgaacccgaattacaacggtatatatcctgtcagccaacaccaaaacatcaaaaaaatcgggatcaggatcaggatctgcggccgcatcctgcaggagctcaaacgagcaggaagcaacgagagggtggcgcgcgaccgacgtgcgtacgtagcatgagcctgagtggagacgttggacgtgtatgtatatacctctctgcgtgttaactatgtacgtaagcggcaggcagtgcaataagtgtggctctgtagtatgtacgtgcgggtacgatgctgtaagctactgaggcaagtccataaataaataatgacacgtgcgtgttctataatctcttcgcttcttcatttgtccccttgcggagtttggcatccattgatgccgttacgctgagaacagacacagcagacgaaccaaaagtgagttcttgtatgaaactatgacccttcatcgctaggctcaaacagcaccccgtacgaacacagcaaattagtcatctaactattagcccctacatgtttcagacgatacataaatatagcccatccttagcaattagctattggccctgcccatcccaagcaatgatctcgaagtatttttaatatatagtatttttaatatgtagcttttaaaattagaagataattttgagacaaaaatctccaagtatttttttgggtattttttactgcctccgtttttctttatttctcgtcacctagtttaattttgtgctaatcggctataaacgaaacagagagaaaagttactctaaaagcaactccaacagattagatataaatcttatatcctgcctagagctgttaaaaagatagacaactttagtggattagtgtatgcaacaaactctccaaatttaagtatcccaactacccaacgcatatcgttcccttttcattggcgcacgaactttcacctgctatagccgacgtacatgttcgttttttttgggcggcgcttactttcttccccgttcgttctcagcatcgcaactcaatttgttatggcggagaagcccttgtatcccaggtagtaatgcacagatatgcattattattattcataaaacgaacgctcttcaactggaagagcggttactaccggttcactagctagctgctaatcgagctagttaccctatgaggtgacatgaagcgctcacggttactatgacggttagcttcacgactgttggtggcagtagcgtacgacttagctatagttccggacttacctagctaggttacctcgagggtgctaagcacgacatccatggcgaccccagtgatggcaactaagtggatcaacagcaacttttgctccgatttgcgatataatttgtcaaaacatgcctctaaaatcactctaacatcaaatttcttgaataacaattttatacactcccctcctccaacttgttatgtgcccttctgacccttcttgttttgtttgctagttaaccatgtaggaaaaagtatcactccactcaatagtattttcacttcatctggccataaataattttggcctaattcagcatcacgtatcaggagtcaataagcttgtctgtccgtctgtatttatcatctctcttcgtgctactatcacctccccttttcttatggatttttcctgttaaaaaacaaaaaggaacaggtaacccacttgaattaggacaccaatgtaggtgccaccacccgtttccttctgttgagtgtgcacgcttattggttcaacctcagaattaaattcttcataatcccctgttgagagaaaattataatagacaaatcaaattgtgtggacttgccatttcccaaaacattttcattttgtgcgcgtgtgggtggtggggtgcgttttattagaatgaagactgtaaaaaagaggagtgtaggatgataagaagtagtaaatgtcagttgtcaaaagatgaaaagcaacggaggaagggaccaaaccttgacctatggaaaactgagtgctatggtaattattgtcacaggatttaggatgattaataatagttcggaccacaaataaacagctttaagaagttcaactttcccccacggatagcaaatttggttggaccatctttgatgaaagtccccaatctcataattgccaaccttttttatacgaaactagtattttcataattatcaagaatcttcaactcatcagtgatcgctcatttctgattaagaaaaaaaaagggtgagtaaatgaatccattttgtctgttctccatggatctcgacgcggccgctctagaaagcttagatcaggatattcttgtttaagatgttgaactctatggaggtttgtatgaactgatgatctaggaccggataagttcccttcttcatagcgaacttattcaaagaatgttttgtgtatcattcttgttacattgttattaatgaaaaaatattattggtcattggactgaacacgagtgttaaatatggaccaggccccaaataagatccattgatatatgaattaaataacaagaataaatcgagtcaccaaaccacttgccttttttaacgagacttgttcaccaacttgatacaaaagtcattatcctatgcaaatcaataatcatacaaaaatatccaataacactaaaaaattaaaagaaatggataatttcacaatatgttatacgataaagaagttacttttccaagaaattcactgattttataagcccacttgcattagataaatggcaaaaaaaaacaaaaaggaaaagaaataaagcacgaagaattctagaaaatacgaaatacgcttcaatgcagtgggacccacggttcaattattgccaattttcagctccaccgtatatttaaaaaataaaacgataatgctaaaaaaatataaatcgtaacgatcgttaaatctcaacggctggatcttatgacgaccgttagaaattgtggttgtcgacgagtcagtaataaacggcgtcaaagtggttgcagccggcacacacgagtcgtgtttatcaactcaaagcacaaatacttttcctcaacctaaaaataaggcaattagccaaaaacaactttgcgtgtaaacaacgctcaatacacgtgtcattttattattagctattgcttcaccgccttagctttctcgtgacctagtcgtcctcgtcttttcttcttcttcttctataaaacaatacccaaagagctcttcttcttcacaattcagatttcaatttctcaaaatcttaaaaactttctctcaattctctctaccgtgatcaaggtaaatttctgtgttccttattctctcaaaatcttcgattttgttttcgttcgatcccaatttcgtatatgttctttggtttagattctgttaatcttagatcgaagacgattttctgggtttgatcgttagatatcatcttaattctcgattagggtttcatagatatcatccgatttgttcaaataatttgagttttgtcgaataattactcttcgatttgtgatttctatctagatctggtgttagtttctagtttgtgcgatcgaatttgtcgattaatctgagtttttctgattaacagccatggctgcaactactcttacatctgctttacctggtgctttcagttcatcccagagaccaagtgctcctttcaacttacaaagatcacctagagtgcttagaaggttcaacagaaagacaggacgtcaacctcgtggacttgttcgtgctgcaaaggctcaagcggcgcaaaacctgccagagaaattcgatgaaacaagactctgggaggccctcaggggatttggggttagtccaagtagggttacttacgctcccgtcggattcggagattaccactggaccgtcacagatgaagacgggagaccttggttcgcaactgtcagtgacctcgaacacaaagagcattgcgggcagggagcacaagcagcccttaaaggactcagacaagctatggacactgccctcgcacttagagatagggacggactcagattcgtggttgctccagtggcagcaacagatgggggtggccctgtccttccccttgacgctaggtatgcactcacagtcttccctcacgtcccaggaagaacaggagagttcggacaaagactcacagaggcagagagggacagactgcttgctcttctggcagaactccacggaagaacacctcctgaaacaaccccaccagccgatatggaaccaccaggacttcctggtgttagagcagcactcgccgaaagtgaaggaccttggagtggaggaccatttgcagaacccgctagacttcttctcagagaacacgaggccacactgcacgcaagactcgctgaattcgaagccctcgtcgcaagagttaagggtcgtggagcacctcttgtcgttacccacggagaaccacacccaggcaacttgatcctcggagaggaaggctatctcctcgtggactgggatacagttggactggctccagctgaaagggatttgagtctcatctcagacgacccagctgacctcgcaagatacgcagagcttacaggaagaactccagacccagacgcactcgcactctatagactgcgttggagtctccttgatgtggctgagttcgtcgagtggttcagggctgaacaccaaagaacccaagacaccgagagtgcatggaaggggttcactgacacacttgggcaattggctgctggtggatcagctgcatagcctaggaaacttatctctgttatgaatcagaagaagttcatgtctcgtttcatttaaaactttggtggtttgtgttttggggccttgtaaagcccctgatgaataattgttcaactatgtttccgttcctgtgttatacctttctttctaatgagtaatgacatcaaacttcttctgtattgaaattatgtccttgtgagtctctttatcatcgtttcgtctttacattatatgtgctacttttgtctaatgagcctgaaaagtggctccaatggtacgcactggaagatttgttggcttctggtagatatagcgacagtgttgagcttgtaatatcatgtctcttattgctaaattagttcctttcttaacagaaaccttcaaagtttttgtttttgttttcatttacctaatgtacacatacgctggccatgactaacaacatgtccaggcttagagcatatttttttctagcttaaattgttaacttgtcattcagtaaaatccgagaattgtgaagctctaattgaagctaattcgttttataaagtcagttaaaaagtatactaaattatccaacttttcttcaaaatctcaaaattctatgacaaaacgatagtctttgtttatgtcagtaccacaaagaggtggaaaaaaacaccaaaaaaacaataagcaaactatacactgagaagaaaaataaaagagagctcaatagatgttttatactaacggtagattagatcaaagatccaagctttactctacatagagcagaacccagaatcccttcatatctcttttattctagcaccgataatctactgaaaagaagacacttagagctctgtctctttgtcaaagaagtcccagccgtcatccagaagctccttacgttcattaacagaggtaccatcatgtcgtgcttagcacgtgatgcatcatagatgcggtaaattattactttctgtgactgggacaatgtgctcctccagtggccacgtatcggtaaaccttgtgccagaacactaatatttatataatcaacaataaagaatggtaagcattagacaaagacaaaaacaatttttaataatttacctgtactaattagaaggggtttgatttaattttattaaacttaacatgtgcaatatgtccctttgtttagaggaaaacaattacggtatttccttactaacgtaaactctgaatataatcatacatctgtattctgaaaaagaaaaaagaactagagataaaagcgtagaaacaacagtatgtggtcatagtcatacacgtaaagggatgaaaattgaaaatagaacctgcaggaaataagtttgcatttaatttggatatatatcttgaagtgtaaggttaacctctcagctattaaatagtactactactaacactcaaatagtacttctactagcactcacggtaacaatctcttagtagggatgggaataggccagatcggcctacaggggtctacgacttgaggtgctaagcacgacatccatggcttcgttgaacaacggaaactcgacttgccttccgcacaatacatcatttcttcttagctttttttcttcttcttcgttcatacagtttttttttgtttatcagcttacattttcttgaaccgtagctttcgttttcttctttttaactttccattcggagtttttgtatcttgtttcatagtttgtcccaggattagaatgattaggcatcgaaccttcaagaatttgattgaataaaacatcttcattcttaagatatgaagataatcttcaaaaggcccctgggaatctgaaagaagagaagcaggcccatttatatgggaaagaacaatagtatttcttatataggcccatttaagttgaaaacaatcttcaaaagtcccacatcgcttagataagaaaacgaagctgagtttatatacagctagagtcgaagtagtgattggtgctaagcacgacatccagttttagagctagaaatagcaagttaaaataaggctagtccgttatcaacttgaaaaagtggcaccgagtcggtgcttttttttcggaccgggttaccagtctaaaaacggcccctaactaacgcttagttgcccgctagattagtcccccgttagtgcctagttagacacacgacgaactaggggctactagtagcggccgcaattggatcgggtttacttattttgtgggtatctatacttttattagatttttaatcaggctcctgatttctttttatttcgattgaattcctgaacttgtattattcagtagatcgaataaattataaaaagataaaatcataaaataatattttatcctatcaatcatattaaagcaatgaatatgtaaaattaatcttatctttattttaaaaaatcatataggtttagtatttttttaaaaataaagataggattagttttactattcactgcttattacttttaaaaaaatcataaaggtttagtatttttttaaaataaatataggaatagttttactattcactgctttaatagaaaaatagtttaaaatttaagatagttttaatcccagcatttgccacgtttgaacgtgagccgaaacgatgtcgttacattatcttaacctagctgaaacgatgtcgtcataatatcgccaaatgccaactggactacgtcgaacccacaaatcccacaaagcgcgtgaaatcaaatcgctcaaaccacaaaaaagaacaacgcgtttgttacacgctcaatcccacgcgagtagagcacagtaaccttcaaataagcgaatggggcataatcagaaatccgaaataaacctaggggcattatcggaaatgaaaagtagctcactcaatataaaaatctaggaaccctagttttcgttatcactctgtgctccctcgctctatttctcagtctctgtgtttgcggctgaggattccgaacgagtgaccttcttcgtttctcgcaaaggtaacagcctctgctcttgtctcttcgattcgatctatgcctgtctcttatttacgatgatgtttcttcggttatgtttttttatttatgctttatgctgttgatgttcggttgtttgtttcgctttgtttttgtggttcagttttttaggattcttttggtttttgaatcgattaatcggaagagattttcgagttatttggtgtgttggaggtgaatcttttttttgaggtcatagatctgttgtatttgtgttataaacatgcgactttgtatgattttttacgaggttatgatgttctggttgttttattatgaatctgttgagacagaaccatgatttttgttgatgttcgtttacactattaaaggtttgttttaacaggattaaaagttttttaagcatgttgaaggagtcttgtagatatgtaaccgtcgatagtttttttgtgggtttgttcacatgttatcaagcttaatcttttactatgtatgcgaccatatctggatccagcaaaggcgattttttaattccttgtgaaacttttgtaatatgaagttgaaattttgttattggtaaactataaatgtgtgaagttggagtatacctttaccttcttatttggctttgtgatagtttaatttatatgtattttgagttctgacttgtatttctttgaattgattctagtttaagtaatccatggcacctaaaaagaagaggaaagttatggacaaaaagtactccatagggctcgatatcggcacaaacagtgtggggtgggcagtcatcactgacgactacaaggtcccctccaagaagttcaaggtcctcggcaatacagaccgccactccatcaagaagaacctcatcggagcactgttgttcgactccggagaaactgccgaagcaaccagactcaagaggaccgccagaagaaggtacacaaggcgcaagaacaggatctgctacctccaggagatcttcagtaacgagatggcaaaggtcgacgactctttcttccacaggctcgaggaatccttcctcgtcgaggaggacaagaagcatgagagacaccccatcttcggaaacatcgtcgacgaggtaagtttctgcttctacctttgatatatatataataattatcattaattagtagtaatataatatttcaaatatttttttcaaaataaaagaatgtagtatatagcaattgcttttctgtagtttataagtgtgtatattttaatttataacttttctaatatatgaccaaaacatggtgatgtgcaggtcgcctaccacgagaagtacccaaccatctaccacctgaggaagaagctcgtcgacagtaccgacaaggctgacctcaggctcatctacctcgcactcgcccacatgattaagttcaggggccacttcctcatagagggagacctcaacccagacaactccgacgtcgacaaactcttcatccaactcgtgcagacctacaatcaactctttgaagagaacccaatcaacgcctccggagtggatgctaaggctatattgtccgccaggctctccaaatcaagacgcctcgaaaacctcatcgcccagctcccaggggagaagaaaaatagcctcttcgggaacctcatagccctgtcccttggactcacccctaacttcaaatcaaatttcgacctcgcagaggacgctaagcttcaactctccaaggacacctacgacgacgacctcgataacctcctcgcccaaatcggtgatcaatacgctgacctcttcctcgctgctaagaacctctccgacgccatactcctctccgacattctgagggtcaacaccgagatcacaaaggctcccttgtccgcctccatgattaaacgctacgacgaacaccaccaggacctcaccctcttgaaggcactggttagacagcagctccccgagaagtacaaggaaatcttcttcgaccaatcaaaaaacggctacgccggatacatcgacggaggagcatcccaggaagagttctacaagttcatcaaaccaattctcgaaaagatggacggaacagaggagctcttggtcaagctcaacagggaggacctcctcagaaagcagagaaccttcgacaacggcagtatcccccaccagatccaccttggagagttgcacgcaatcctcaggaggcaagaggacttctaccccttcctcaaggacaacagggagaagatcgagaagatccttacattccgcatcccctactacgtcggacctttggcaagaggaaactcccgcttcgcatggatgactcgcaagagtgaggaaaccatcaccccttggaacttcgaggaggtcgtcgataagggagcttcagcccagtccttcatcgagcgcatgaccaacttcgataaaaatctccccaatgaaaaagtcctccccaagcacagtctgctctacgagtacttcacagtctacaacgagctcaccaaggtcaagtacgtcaccgaaggcatgagaaaacccgccttcctcagtggcgagcagaagaaggcaatcgtggacttgctgttcaagaccaaccgcaaggtcacagtcaagcaattaaaagaggactacttcaagaaaatagagtgcttcgacagtgtcgagatctctggggtcgaggacaggttcaacgcatccttggggacctatcacgacctcctcaagatcattaaagacaaggacttcctcgacaacgaggagaacgaggacatactggaggacatcgtcctcaccctcactctctttgaggacagggagatgatagaggagcgcctcaaaacctacgcccacctcttcgacgacaaggtgatgaaacagctcaagaggcgcagatacaccggatggggtagactctccaggaagctgattaatggcatccgcgacaaacagtccggcaagaccatcctcgacttcctcaagagtgacggattcgccaaccgcaacttcatgcagctcatacacgacgactccctcaccttcaaggaggacatccaaaaagcccaagtctccggacagggagactcattgcacgaacacatcgccaacttggctggatctcctgctattaaaaagggcatcctccaaaccgtcaaggtggtcgacgaactcgtcaaggtcatgggtagacacaagcccgaaaatatcgtcatcgagatggcaagggagaaccagacaacccagaagggccaaaaaaactccagggagcgcatgaaacgcatcgaggagggaataaaggagctcgggtcccagatcctcaaggagcaccccgtcgaaaatactcaactccagaatgaaaagctctacctctactacctccaaaacggcagggatatgtacgtcgaccaagagctcgacattaatcgcctctccgactacgacgtcgatcacatcgtcccccagagtttcctcaaggacgactccatcgacaacaaggtcctcaccagatccgataaaaatcgcggaaagtccgacaacgtcccctctgaggaagtggttaagaagatgaaaaactactggagacagctcctcaacgcaaagctgatcacccagcgcaagttcgacaacctcacaaaggctgagagagggggactctctgagttggacaaggccggcttcatcaagagacaactcgtggaaacccgccagatcaccaagcatgtcgcacagattctcgactcccgcatgaatactaaatacgatgaaaatgacaagctcatcagggaggtcaaggtcatcaccctgaagtccaagctcgtctccgacttccgcaaggacttccagttctacaaggtccgcgagatcaacaactaccaccacgcccacgacgcatacctcaacgctgtggttggaacagcactcatcaagaagtaccccaagctcgagtccgagttcgtctacggcgactacaaggtctacgacgtcaggaagatgatcgccaagtccgagcaagagatcggaaaggccaccgcaaaatatttcttctactccaacataatgaacttcttcaaaaccgagatcaccctggctaacggagaaataaggaagaggcccctgatagaaaccaacggcgagacaggcgagattgtctgggacaaaggcagggacttcgcaaccgtcagaaaggtgctcagtatgcctcaggtcaacatagtcaaaaagaccgaagtccagactggaggattctccaaggagtccatcctccccaaaaggaactccgacaaactgatcgccaggaaaaaggactgggaccccaaaaaatatggcggcttcgactcccctactgttgcttacagtgtgctcgtcgtcgcaaaagtcgagaaggggaaatccaagaagctcaagtcagtgaaggagctcctcggcatcaccatcatggagaggtcctccttcgagaagaaccccatcgacttcctcgaggccaagggatataaggaggtcaagaaggacctcatcattaaactccccaagtactccctcttcgagctcgaaaacggacgcaagaggatgctcgcttcagctggtgaactccagaagggcaacgaactcgctttgccctctaaatacgtcaacttcctctacctcgcctcccactatgaaaagctcaagggctccccagaggacaacgagcagaagcaactcttcgtcgagcagcacaagcattacctcgacgagatcatcgagcagatctccgagttctccaagagagtcatcctcgctgacgcaaacctcgacaaggtcctcagtgcatataacaagcaccgcgacaaaccaataagggagcaggccgaaaatattatacacctgttcaccctcaccaacttgggagcaccagccgccttcaagtatttcgacaccaccatcgacagaaagcgctacacctccacaaaggaggtcctggacgccacacttatccaccagtccatcaccggcctctatgaaacacgcatcgacctctctcaattgggaggggacaagagaccaagagacagacacgatggagagcttggaggtagaaagagagcaaggtagttcgaactggccaggtaccgttaacctagacttgtccatcttctggattggccaacttaattaatgtatgaaataaaaggatgcacacatagtgacatgctaatcactataatgtgggcatcaaagttgtgtgttatgtgtaattactagttatctgaataaaagagaaagagatcatccatatttcttatcctaaatgaatgtcacgtgtctttataattctttgatgaaccagatgcatttcattaaccaaatccatatacatataaatattaatcatatataattaatatcaattgggttagcaaaacaaatctagtctaggtgtgttttgcaagcttggcgcgccgttaacttaacggcaaacgctaattagtcactaggcccaggaaacactaactaagccctagcttatcctagcgcaacctagttaggtcttggtaacccgaaatctagtctaggtgtgttttgcgatccgatatcgatgcggccgcggtaccggcggccgcgggcaactttattatacaaagttgatacccgggtgattgcggttacatcatgtacggaaaaataattctaatccttgatttaaatttgaacttgactatttatttattctttatttcattttgtaaatcattttatgtatctcctggcaagcaattttatccaccttgcaccaacaccttcgggttccataatcaaaccaccttaacttcacaccatgctgtaactcacaccgcccagcatctccaatgtgaaagaagctaaaatttaataaacaatcatacgaagcagtgacaaaataccagatggtattaatgcttcgataaaattaattggaaagtataaaatggtagaaaataataaattataattaatttaagtaagataaaaaataattaaaaactaaaatgttaaaattttaaaaaaattattttaaataatatttaaaaacattaaaaatcattttaaaaaatttatttatagaacaattaaataaatatttcagctaataaaaaacaaaagcttacctagccttagaagacaacttgtccaacaattagatgatacccattgcccttacgttttctttaacatcaattattgtttttgtcaacaagctatcttttagttttattttattggtaaaaaatatgtcgccttcaagttgcatcatttaacacatctcgtcattagaaaaataaaactcttccctaaacgattagtagaaaaaatcattcgataataaataagaaagaaaaattagaaaaaaataacttcattttaaaaaaatcattaaggctatattttttaaatgactaattttatatagactgtaactaaaagtatacaatttattatgctatgtatcttaaagaattacttataaaaatctacggaagaatatcttacaaagtgaaaaacaaatgagaaagaatttagtgggatgattatgattttatttgaaaattgaaaaaataattattaaagactttagtggagtaagaaagctttcctattagtcttttcttatccataaaaaaaaaaaaaaaaatctagcgtgacagcttttccatagattttaataatgtaaaatactggtagcagccgaccgttcaggtaatggacactgtggtcctaacttgcaacgggtgcgggcccaatttaataacgccgtggtaacggataaagccaagcgtgaagcggtgaaggtacatctctgactccgtcaagattacgaaaccgtcaactacgaaggactccccgaaatatcatctgtgtcataaacaccaagtcacaccatacatgggcacgcgtcacaatatgattggagaacggttccaccgcatatgctataaaatgcccccacacccctcgaccctaatcgcacttcaattgcaatcaaattagttcattctctttgcgcagttccctacctctcctttcaaggttcgtagatttcttccgtttttttttcttcttctttattgtttgttctacatcagcatgatgttgatttgattgtgttttctatcgtttcatcgattataaattttcataatcagaagattcagcttttattaatgcaagaacgtccttaattgatgattttataaccgtaaattaggtctaattagagtttttttcataaagattttcagatccgtttacaacaagccttaattgttgattctgtagtcgtagattaaggtttttttcatgaactacttcagatccgttaaacaacagccttatttgttgatacttcagtcgtttttcaagaaattgttcagatccgttgataaaagccttattcgttgattctgtatggtatttcaagagatattgctcaggtcctttagcaactaccttatttgttgattctgtggccatagattaggattttttttcacgaaattgcttcttgaaattacgtgatggattttgattctgatttatcttgtgattgttgactctacagccatggcccacagcaagcacggcctgaaggaggagatgaccatgaagtaccacatggagggctgcgtgaacggccacaagttcgtgatcaccggcgagggcatcggctaccccttcaagggcaagcagaccatcaacctgtgcgtgatcgagggcggccccctgcccttcagcgaggacatcctgagcgccggcttcaagtacggcgaccggatcttcaccgagtacccccaggacatcgtggactacttcaagaacagctgccccgccggctacacctggggccggagcttcctgttcgaggacggcgccgtgtgcatctgtaacgtggacatcaccgtgagcgtgaaggagaactgcatctaccacaagagcatcttcaacggcgtgaacttccccgccgacggccccgtgatgaagaagatgaccaccaactgggaggccagctgcgagaagatcatgcccgtgcctaagcagggcatcctgaagggcgacgtgagcatgtacctgctgctgaaggacggcggccggtaccggtgccagttcgacaccgtgtacaaggccaagagcgtgcccagcaagatgcccgagtggcacttcatccagcacaagctgctgcgggaggaccggagcgacgccaagaaccagaagtggcagctgaccgagcacgccatcgccttccccagcgccctggcctgagagctcgaatttccccgatcgttcaaacatttggcaataaagtttcttaagattgaatcctgttgccggtcttgcgatgattatcatataatttctgttgaattacgttaagcatgtaataattaacatgtaatgcatgacgttatttatgagatgggtttttatgattagagtcccgcaattatacatttaatacgcgatagaaaacaaaatatagcgcgcaaactaggataaattatcgcgcgcggtgtcatctatgttactagatcgggaattctagtggccggcccagctgatatctagacccagctttcttgtacaaagtggcccggggcggccgaagctggccttctaggcccggaccgggtgaccaagcttggcgcgcccagggcccatcgatatcggtacctacgcgttcgaatatccatggatccgaattccgcggccgcttggtaacccggtccgggccattctggccgatccgttaacgcccgggcaactttattatacaaagttgatggtacggatccgtcgacggcgcgccgcggacctgaattccagcacactggcggccgttactagtaacggccgccagtgtgctggaattcgcccttcccaagctttgctctagatcaaactcacatccaaacataacatggatatcttccttaccaatcatactaattattttgggttaaatattaatcattatttttaagatattaattaataagtgactagggtcacgtgaccctagtcacttatgattccgatgacttcgtaggttcctagctcaagccgctcgtgtccaagcgtcacttacgattagctaatgattacggcatctaggaccgactagttcttatgtgcttctagtctccaaatgtggttgatagttattttgctctaagatcaacagtaatgaagtataaatcatcgttgtggtgtgctactcggttaattgagcattaacacacacaaacatgacgaggatggtataatctccaaaaatgtgtactttgttaggtgggaccctatagccttgattaatgtgctatgttaggcatgcctggaaacgtgtgacgcatatgttttgtgaacctgttgatattatatgtgcttttatattaccatattttattaaaatactaatatttattactagtaagatataacattctatctagcttaaaaactaaccataaatattccataataactagatttaccaaactaatatactaaatatacataataaatacaaaattaacaagacaataatcaatatttatgagcttaatatatttagacattatggttggtcgacgataatcatgctaacttttcgtaattgcttgattgaaatatgcttagaataatgcctctttgttctacatggcaaatagggaccattatggtgtaacaccctgggaaccacaaacaccccgaaatgctactaaactacacaactaaccttcatatataaaatttcgacagcatctcctttgaaaatttgcatagacgtggaagcaacagagtataaacagatctagctagctaagtttaaacggccggccaaacgtgcaagcgctactagacaattcagtacattaaaaacgtccgcaatgtgttattaagttgtctaagcgtcaatttatttacaattgaatatatcctgccaccagccagccaacagctccccgaccggcagctcggcacaaaatcaccactcgatacaggcagcccatcagtccgggacggcgtcagcgggagagccgttgtaaggcggcagactttgctcatgttaccgatgctattcggaagaacggcaactaagctgccgggtttgaaacacggatgatctcgcggagggtagcatgttgattgtaacgatgacagagcgttgctgcctgtgatcaaatatcatctccctcgcagagatccgaattatcagccttcttattcatttctcgcttaaccgtgacaggcgcgcgcggtgccacctgggtccttttcatcacgtgctataaaaataattataatttaaattttttaatataaatatataaattaaaaatagaaagtaaaaaaagaaattaaagaaaaaatagtttttgttttccgaagatgtaaaagactctagggggatcgccaacaaatactaccttttatcttgctcttcctgctctcaggtattaatgccgaattgtttcatcttgtctgtgtagaagaccacacacgaaaatcctgtgattttacattttacttatcgttaatcgaatgtatatctatttaatctgcttttcttgtctaataaatatatatgtaaagtacgctttttgttgaaattttttaaacctttgtttatttttttttcttcattccgtaactcttctaccttctttatttactttctaaaatccaaatacaaaacataaaaataaataaacacagagtaaattcccaaattattccatcattaaaagatacgaggcgcgtgtaagttacaggcaagcgatccgtcctaagaaaccattattatcatgacattaacctataaaaataggcgtatcacgaggccctttcgtctcgcgcgtttcggtgatgacggtgaaaacctctgacacatgcagctcccggagacggtcacagcttgtctgtaagcggatgccgggagcagacaagcccgtcagggcgcgtcagcgggtgttggcgggtgtcggggctggcttaactatgcggcatcagagcagattgtactgagagtgcaccataccacagcttttcaattcaattcatcattttttttttattcttttttttgatttcggtttctttgaaatttttttgattcggtaatctccgaacagaaggaagaacgaaggaaggagcacagacttagattggtatatatacgcatatgtagtgttgaagaaacatgaaattgcccagtattcttaacccaactgcacagaacaaaaacctgcaggaaacgaagataaatcatgtcgaaagctacatataaggaacgtgctgctactcatcctagtcctgttgctgccaagctatttaatatcatgcacgaaaagcaaacaaacttgtgtgcttcattggatgttcgtaccaccaaggaattactggagttagttgaagcattaggtcccaaaatttgtttactaaaaacacatgtggatatcttgactgatttttccatggagggcacagttaagccgctaaaggcattatccgccaagtacaattttttactcttcgaagacagaaaatttgctgacattggtaatacagtcaaattgcagtactctgcgggtgtatacagaatagcagaatgggcagacattacgaatgcacacggtgtggtgggcccaggtattgttagcggtttgaagcaggcggcagaagaagtaacaaaggaacctagaggccttttgatgttagcagaattgtcatgcaagggctccctatctactggagaatatactaagggtactgttgacattgcgaagagcgacaaagattttgttatcggctttattgctcaaagagacatgggtggaagagatgaaggttacgattggttgattatgacacccggtgtgggtttagatgacaagggagacgcattgggtcaacagtatagaaccgtggatgatgtggtctctacaggatctgacattattattgttggaagaggactatttgcaaagggaagggatgctaaggtagagggtgaacgttacagaaaagcaggctgggaagcatatttgagaagatgcggccagcaaaactaaaaaactgtattataagtaaacgcgcgcgggcgcgccttttcagcctgatacagattaaatcagaacgcagaagcggtctgataaaacagaatttgcctggcggcagtagcgcggtggtcccacctgaccccatgccgaactcagaagtgaaacgccgtagcgccgatggtagtgtggggtctccccatgcgagagtagggaactgccaggcatcaaataaaacgaaaggctcagtcgaaagactgggcctttcgttttatctgttgtttgtcggtgaacgctctcctgagtaggacaaatccgccgggagcggatttgaacgttgcgaagcaacggcccggagggtggcgggcaggacgcccgccataaactgccaggcatcaaattaagcagaaggccatcctgacggatggcctttttgcgtttctacaaactcttaccgcacccggagcgggcgcgaggccgccaaggcccgaggcgtgaagtttggcccccgccctaccctcaccccggcacagatcgcgcacgcccgcgagctgatcgaccaggaaggccgcaccgtgaaagaggcggctgcactgcttggcgtgcatcgctcgaccctgtaccgcgcacttgagcgcagcgaggaagtgacgcccaccgaggccaggcggcgcggtgccttccgtgaggacgcattgaccgaggccgacgccctggcggccgccgagaatgaacgccaagaggaacaagcatgaaaccgcaccaggacggccaggacgaaccgtttttcattaccgaagagatcgaggcggagatgatcgcggccgggtacgtgttcgagccgcccgcgcacgtctcaaccgtgcggctgcatgaaatcctggccggtttgtctgatgccaagctggcggcctggccggccagcttggccgctgaagaaaccgagcgccgccgtctaaaaaggtgatgtgtatttgagtaaaacagcttgcgtcatgcggtcgctgcgtatatgatgcgatgagtaaataaacaaatacgcaaggggaacgcatgaaggttatcgctgtacttaaccagaaaggcgggtcaggcaagacgaccatcgcaacccatctagcccgcgccctgcaactcgccggggccgatgttctgttagtcgattccgatccccagggcagtgcccgcgattgggcggccgtgcgggaagatcaaccgctaaccgttgtcggcatcgaccgcccgacgattgaccgcgacgtgaaggccatcggccggcgcgacttcgtagtgatcgacggagcgccccaggcggcggacttggctgtgtccgcgatcaaggcagccgacttcgtgctgattccggtgcagccaagcccttacgacatatgggccaccgccgacctggtggagctggttaagcagcgcattgaggtcacggatggaaggctacaagcggcctttgtcgtgtcgcgggcgatcaaaggcacgcgcatcggcggtgaggttgccgaggcgctggccgggtacgagctgcccattcttgagtcccgtatcacgcagcgcgtgagctacccaggcactgccgccgccggcacaaccgttcttgaatcagaacccgagggcgacgctgcccgcgaggtccaggcgctggccgctgaaattaaatcaaaactcatttgagttaatgaggtaaagagaaaatgagcaaaagcacaaacacgctaagtgccggccgtccgagcgcacgcagcagcaaggctgcaacgttggccagcctcgcagacacgccagccatgaagcgggtcaactttcagttgccggcggaggatcacaccaagctgaagatgtacgcggtacgccaaggcaagaccattaccgagctgctatctgaatacatcgcgcagctaccagagtaaatgagcaaatgaataaatgagtagatgaattttagcggctaaaggaggcggcatggaaaatcaagaacaaccaggcaccgacgccgtggaatgccccatgtgtggaggaacgggcggttggccaggcgtaagcggctgggttgcctgccggccctgcaatggcactggaacccccaagcccgaggaatcggcgtgagcggtcgcaaaccatccggcccggtacaaatcggcgcggcgctgggtgatgacctggtggagaagttgaaggcagcgcaggccgcccagcggcaacgcatcgaggcagaagcacgccccggtgaatcgtggcaagcagccgctgatcgaatccgcaaagaatcccggcaaccgccggcagccggtgcgccgtcgattaggaagccgcccaagggcgacgagcaaccagattttttcgttccgatgctctatgacgtgggcacccgcgatagtcgcagcatcatggacgtggccgttttccgtctgtcgaagcgtgaccgacgagctggcgaggtgatccgctacgagcttccagacgggcacgtagaggtttccgcagggccggcaggcatggccagtgtgtgggattacgacctggtactgatggcggtttcccatctaaccgaatccatgaaccgataccgggaagggaagggagacaagcccggccgcgtgttccgtccacacgttgcggacgtactcaagttctgccggcgagccgatggcggaaagcagaaagacgacctggtagaaacctgcattcggttaaacaccacgcacgttgccatgcagcgtacgaagaaggccaagaacggccgcctggtgacggtatccgagggtgaagccttgattagccgctacaagatcgtaaagagcgaaaccgggcggccggagtacatcgagatcgagctagctgattggatgtaccgcgagatcacagaaggcaagaacccggacgtgctgacggttcaccccgattactttttgatcgatcccggcatcggccgttttctctaccgcctggcacgccgcgccgcaggcaaggcagaagccagatggttgttcaagacgatctacgaacgcagtggcagcgccggagagttcaagaagttctgtttcaccgtgcgcaagctgatcgggtcaaatgacctgccggagtacgatttgaaggaggaggcggggcaggctggcccgatcctagtcatgcgctaccgcaacctgatcgagggcgaagcatccgccggttcctaatgtacggagcagatgctagggcaaattgccctagcaggggaaaaaggtcgaaaaggtctctttcctgtggatagcacgtacattgggaacccaaagccgtacattgggaaccggaacccgtacattgggaacccaaagccgtacattgggaaccggtcacacatgtaagtgactgatataaaagagaaaaaaggcgatttttccgcctaaaactctttaaaacttattaaaactcttaaaacccgcctggcctgtgcataactgtctggccagcgcacagccgaagagctgcaaaaagcgcctacccttcggtcgctgcgctccctacgccccgccgcttcgcgtcggcctatggcgcgccggaaaatatgcatggcatgcccgttccatacagaagctgggcgaacaaacgatgctcgccttccagaaaaccgaggatgcgaaccacttcatccggggtcagcaccaccggcaagcgccgcgacggccgaggtcttccgatctcctgaagccagggcagatccgtgcacagcaccttgccgtagaagaacagcaaggccgccaatgcctgacgatgcgtggagaccgaaaccttgcgctcgttcgccagccaggacagaaatgcctcgacttcgctgctgcccaaggttgccgggtgacgcacaccgtggaaacggatgaaggcacgaacccagtggacataagcctgttcggttcgtaagctgtaatgcaagtagcgtatgcgctcacgcaactggtccagaaccttgaccgaacgcagcggtggtaacggcgcagtggcggttttcatggcttgttatgactgtttttttggggtacagtctatgcctcgggcatccaagcagcaagcgcgttacgccgtgggtcgatgtttgatgttatggagcagcaacgatgttacgcagcagggcagtcgccctaaaacaaagttaaacatcatgagggaagcggtgatcgccgaagtatcgactcaactatcagaggtagttggcgtcatcgagcgccatctcgaaccgacgttgctggccgtacatttgtacggctccgcagtggatggcggcctgaagccacacagtgatattgatttgctggttacggtgacggtaaggcttgatgaaacaacgcggcgagctttgatcaacgaccttttggaaacttcggcttcccctggagagagcgagattctccgcgctgtagaagtcaccattgttgtgcacgacgacatcattccgtggcgttatccagctaagcgcgaactgcaatttggagaatggcagcgcaatgacattcttgcaggtatcttcgagccagccacgatcgacattgatctggctatcttgctgacaaaagcaagagaacatagcgttgccttggtaggtccagcggcggaggaactctttgatccggttcctgaacaggatctatttgaggcgctaaatgaaaccttaacgctatggaactcgccgcccgactgggctggcgatgagcgaaatgtagtgcttacgttgtcccgcatttggtacagcgcagtaaccggcaaaatcgcgccgaaggatgtcgctgccgactgggcaatggagcgcctgccggcccagtatcagcccgtcatacttgaagctagacaggcttatcttggacaagaagaagatcgcttggcctcgcgcgcagatcagttggaagaatttgtccactacgtgaaaggcgagatcaccaaggtagtcggcaaataatgtctaacaattcgttcaagccgacgccgcttcgcggcgcggcttaactcaagcgttagatgcactatacgtaaccaactagtaggaacagtgaattggagttcgtcttgttataattagcttcttgggggatctttaaatactgtagaaaagaggaaggaaataataaatggctaaaatgagaatatcaccggaattgaaaaaactgatcgaaaaataccgctgcgtaaaagatacggaaggaatgtctcctgctaaggtatataagctggtgggagaaaatgaaaacctatatttaaaaatgacggacagccggtataaagggaccacctatgatgtggaacgggaaaaggacatgatgctatggctggaaggaaagctgcctgttccaaaggtcctgcactttgaacggcatgatggctggagcaatctgctcatgagtgaggccgatggcgtcctttgctcggaagagtatgaagatgaacaaagccctgaaaagattatcgagctgtatgcggagtgcatcaggctctttcactccatcgacatatcggattgtccctatacgaatagcttagacagccgcttagccgaattggattacttactgaataacgatctggccgatgtggattgcgaaaactgggaagaagacactccatttaaagatccgcgcgagctgtatgattttttaaagacggaaaagcccgaagaggaacttgtcttttcccacggcgacctgggagacagcaacatctttgtgaaagatggcaaagtaagtggctttattgatcttgggagaagcggcagggcggacaagtggtatgacattgccttctgcgtccggtcgatcagggaggatatcggggaagaacagtatgtcgagctattttttgacttactggggatcaagcctgattgggagaaaataaaatattatattttactggatgaattgttttagtacctagatacttcgctcgtgaaaagcagcgctcagggggctagtgcgctcttccgcttcctcgctcactgactcgctgcgctcggtcgttcggctgcggcgagcggtatcagctcactcaaaggcggtaatacggttatccacagaatcaggggataacgcaggaaagaacatgtgagcaaaaggccagcaaaaggccaggaaccgtaaaaaggccgcgttgctggcgtttttccataggctccgcccccctgacgagcatcacaaaaatcgacgctcaagtcagaggtggcgaaacccgacaggactataaagataccaggcgtttccccctggaagctccctcgtgcgctctcctgttccgaccctgccgcttaccggatacctgtccgcctttctcccttcgggaagcgtggcgctttctcatagctcacgctgtaggtatctcagttcggtgtaggtcgttcgctccaagctgggctgtgtgcacgaaccccccgttcagcccgaccgctgcgccttatccggtaactatcgtcttgagtccaacccggtaagacacgacttatcgccactggcagcagccactggtaacaggattagcagagcgaggtatgtaggcggtgctacagagttcttgaagtggtggcctaactacggctacactagaagaacagtatttggtatctgcgctctgctgaagccagttaccttcggaaaaagagttggtagctcttgatccggcaaacaaaccaccgctggtagcggtggtttttttgtttgcaagcagcagattacgcgcagaaaaaaaggatctcaagaagatcctttgatcttttctacggggtctgacgctcagtggaacgaaaactcacgttaagggattttggtcatgagattatcaaaaaggatcttcacctagatccttttaaattaaaaatgaagcgtacgttggaatcgcttctacaaaa

SEQ ID NO: 98 - DNA, 26386 bp, Artificial Sequence
  Nucleotide sequence of Vector 10
ctcacagaaacaatcaaacaaacatacacagcgatttattcacacgaacccgaattacaacggtatatatcctgtcagccaacaccaaaacatcaaaaaaatcgggatcaggatcaggatctgcggccgcatcctgcaggagctcaaacgagcaggaagcaacgagagggtggcgcgcgaccgacgtgcgtacgtagcatgagcctgagtggagacgttggacgtgtatgtatatacctctctgcgtgttaactatgtacgtaagcggcaggcagtgcaataagtgtggctctgtagtatgtacgtgcgggtacgatgctgtaagctactgaggcaagtccataaataaataatgacacgtgcgtgttctataatctcttcgcttcttcatttgtccccttgcggagtttggcatccattgatgccgttacgctgagaacagacacagcagacgaaccaaaagtgagttcttgtatgaaactatgacccttcatcgctaggctcaaacagcaccccgtacgaacacagcaaattagtcatctaactattagcccctacatgtttcagacgatacataaatatagcccatccttagcaattagctattggccctgcccatcccaagcaatgatctcgaagtatttttaatatatagtatttttaatatgtagcttttaaaattagaagataattttgagacaaaaatctccaagtatttttttgggtattttttactgcctccgtttttctttatttctcgtcacctagtttaattttgtgctaatcggctataaacgaaacagagagaaaagttactctaaaagcaactccaacagattagatataaatcttatatcctgcctagagctgttaaaaagatagacaactttagtggattagtgtatgcaacaaactctccaaatttaagtatcccaactacccaacgcatatcgttcccttttcattggcgcacgaactttcacctgctatagccgacgtacatgttcgttttttttgggcggcgcttactttcttccccgttcgttctcagcatcgcaactcaatttgttatggcggagaagcccttgtatcccaggtagtaatgcacagatatgcattattattattcataaaacgaacgctcttcaactggaagagcggttactaccggttcactagctagctgctaatcgagctagttaccctatgaggtgacatgaagcgctcacggttactatgacggttagcttcacgactgttggtggcagtagcgtacgacttagctatagttccggacttacctagctaggttacctcgagggtgctaagcacgacatccatggcgaccccagtgatggcaactaagtggatcaacagcaacttttgctccgatttgcgatataatttgtcaaaacatgcctctaaaatcactctaacatcaaatttcttgaataacaattttatacactcccctcctccaacttgttatgtgcccttctgacccttcttgttttgtttgctagttaaccatgtaggaaaaagtatcactccactcaatagtattttcacttcatctggccataaataattttggcctaattcagcatcacgtatcaggagtcaataagcttgtctgtccgtctgtatttatcatctctcttcgtgctactatcacctccccttttcttatggatttttcctgttaaaaaacaaaaaggaacaggtaacccacttgaattaggacaccaatgtaggtgccaccacccgtttccttctgttgagtgtgcacgcttattggttcaacctcagaattaaattcttcataatcccctgttgagagaaaattataatagacaaatcaaattgtgtggacttgccatttcccaaaacattttcattttgtgcgcgtgtgggtggtggggtgcgttttattagaatgaagactgtaaaaaagaggagtgtaggatgataagaagtagtaaatgtcagttgtcaaaagatgaaaagcaacggaggaagggaccaaaccttgacctatggaaaactgagtgctatggtaattattgtcacaggatttaggatgattaataatagttcggaccacaaataaacagctttaagaagttcaactttcccccacggatagcaaatttggttggaccatctttgatgaaagtccccaatctcataattgccaaccttttttatacgaaactagtattttcataattatcaagaatcttcaactcatcagtgatcgctcatttctgattaagaaaaaaaaagggtgagtaaatgaatccattttgtctgttctccatggatctcgacccgggtgattgcggttacatcatgtacggaaaaataattctaatccttgatttaaatttgaacttgactatttatttattctttatttcattttgtaaatcattttatgtatctcctggcaagcaattttatccaccttgcaccaacaccttcgggttccataatcaaaccaccttaacttcacaccatgctgtaactcacaccgcccagcatctccaatgtgaaagaagctaaaatttaataaacaatcatacgaagcagtgacaaaataccagatggtattaatgcttcgataaaattaattggaaagtataaaatggtagaaaataataaattataattaatttaagtaagataaaaaataattaaaaactaaaatgttaaaattttaaaaaaattattttaaataatatttaaaaacattaaaaatcattttaaaaaatttatttatagaacaattaaataaatatttcagctaataaaaaacaaaagcttacctagccttagaagacaacttgtccaacaattagatgatacccattgcccttacgttttctttaacatcaattattgtttttgtcaacaagctatcttttagttttattttattggtaaaaaatatgtcgccttcaagttgcatcatttaacacatctcgtcattagaaaaataaaactcttccctaaacgattagtagaaaaaatcattcgataataaataagaaagaaaaattagaaaaaaataacttcattttaaaaaaatcattaaggctatattttttaaatgactaattttatatagactgtaactaaaagtatacaatttattatgctatgtatcttaaagaattacttataaaaatctacggaagaatatcttacaaagtgaaaaacaaatgagaaagaatttagtgggatgattatgattttatttgaaaattgaaaaaataattattaaagactttagtggagtaagaaagctttcctattagtcttttcttatccataaaaaaaaaaaaaaaaatctagcgtgacagcttttccatagattttaataatgtaaaatactggtagcagccgaccgttcaggtaatggacactgtggtcctaacttgcaacgggtgcgggcccaatttaataacgccgtggtaacggataaagccaagcgtgaagcggtgaaggtacatctctgactccgtcaagattacgaaaccgtcaactacgaaggactccccgaaatatcatctgtgtcataaacaccaagtcacaccatacatgggcacgcgtcacaatatgattggagaacggttccaccgcatatgctataaaatgcccccacacccctcgaccctaatcgcacttcaattgcaatcaaattagttcattctctttgcgcagttccctacctctcctttcaaggttcgtagatttcttccgtttttttttcttcttctttattgtttgttctacatcagcatgatgttgatttgattgtgttttctatcgtttcatcgattataaattttcataatcagaagattcagcttttattaatgcaagaacgtccttaattgatgattttataaccgtaaattaggtctaattagagtttttttcataaagattttcagatccgtttacaacaagccttaattgttgattctgtagtcgtagattaaggtttttttcatgaactacttcagatccgttaaacaacagccttatttgttgatacttcagtcgtttttcaagaaattgttcagatccgttgataaaagccttattcgttgattctgtatggtatttcaagagatattgctcaggtcctttagcaactaccttatttgttgattctgtggccatagattaggattttttttcacgaaattgcttcttgaaattacgtgatggattttgattctgatttatcttgtgattgttgactctacagccatggcccacagcaagcacggcctgaaggaggagatgaccatgaagtaccacatggagggctgcgtgaacggccacaagttcgtgatcaccggcgagggcatcggctaccccttcaagggcaagcagaccatcaacctgtgcgtgatcgagggcggccccctgcccttcagcgaggacatcctgagcgccggcttcaagtacggcgaccggatcttcaccgagtacccccaggacatcgtggactacttcaagaacagctgccccgccggctacacctggggccggagcttcctgttcgaggacggcgccgtgtgcatctgtaacgtggacatcaccgtgagcgtgaaggagaactgcatctaccacaagagcatcttcaacggcgtgaacttccccgccgacggccccgtgatgaagaagatgaccaccaactgggaggccagctgcgagaagatcatgcccgtgcctaagcagggcatcctgaagggcgacgtgagcatgtacctgctgctgaaggacggcggccggtaccggtgccagttcgacaccgtgtacaaggccaagagcgtgcccagcaagatgcccgagtggcacttcatccagcacaagctgctgcgggaggaccggagcgacgccaagaaccagaagtggcagctgaccgagcacgccatcgccttccccagcgccctggcctgagagctcgaatttccccgatcgttcaaacatttggcaataaagtttcttaagattgaatcctgttgccggtcttgcgatgattatcatataatttctgttgaattacgttaagcatgtaataattaacatgtaatgcatgacgttatttatgagatgggtttttatgattagagtcccgcaattatacatttaatacgcgatagaaaacaaaatatagcgcgcaaactaggataaattatcgcgcgcggtgtcatctatgttactagatcgggaattctagtggccggcccagctgatatcatgtcgtgcttagcacgtgatgcatcatagatgcggtaaattattactttctgtgactgggacaatgtgctcctccagtggccacgtatcggtaaaccttgtgccagaacactaatatttatataatcaacaataaagaatggtaagcattagacaaagacaaaaacaatttttaataatttacctgtactaattagaaggggtttgatttaattttattaaacttaacatgtgcaatatgtccctttgtttagaggaaaacaattacggtatttccttactaacgtaaactctgaatataatcatacatctgtattctgaaaaagaaaaaagaactagagataaaagcgtagaaacaacagtatgtggtcatagtcatacacgtaaagggatgaaaattgaaaatagaacctgcaggaaataagtttgcatttaatttggatatatatcttgaagtgtaaggttaacctctcagctattaaatagtactactactaacactcaaatagtacttctactagcactcacggtaacaatctcttagtagggatgggaataggccagatcggcctacaggggtctacgacttgaggtgctaagcacgacatccatggcttcgttgaacaacggaaactcgacttgccttccgcacaatacatcatttcttcttagctttttttcttcttcttcgttcatacagtttttttttgtttatcagcttacattttcttgaaccgtagctttcgttttcttctttttaactttccattcggagtttttgtatcttgtttcatagtttgtcccaggattagaatgattaggcatcgaaccttcaagaatttgattgaataaaacatcttcattcttaagatatgaagataatcttcaaaaggcccctgggaatctgaaagaagagaagcaggcccatttatatgggaaagaacaatagtatttcttatataggcccatttaagttgaaaacaatcttcaaaagtcccacatcgcttagataagaaaacgaagctgagtttatatacagctagagtcgaagtagtgattggtgctaagcacgacatccagttttagagctagaaatagcaagttaaaataaggctagtccgttatcaacttgaaaaagtggcaccgagtcggtgcttttttttcggaccgggttaccagtctaaaaacggcccctaactaacgcttagttgcccgctagattagtcccccgttagtgcctagttagacacacgacgaactaggggctactagtagcggccgcaattggatcgggtttacttattttgtgggtatctatacttttattagatttttaatcaggctcctgatttctttttatttcgattgaattcctgaacttgtattattcagtagatcgaataaattataaaaagataaaatcataaaataatattttatcctatcaatcatattaaagcaatgaatatgtaaaattaatcttatctttattttaaaaaatcatataggtttagtatttttttaaaaataaagataggattagttttactattcactgcttattacttttaaaaaaatcataaaggtttagtatttttttaaaataaatataggaatagttttactattcactgctttaatagaaaaatagtttaaaatttaagatagttttaatcccagcatttgccacgtttgaacgtgagccgaaacgatgtcgttacattatcttaacctagctgaaacgatgtcgtcataatatcgccaaatgccaactggactacgtcgaacccacaaatcccacaaagcgcgtgaaatcaaatcgctcaaaccacaaaaaagaacaacgcgtttgttacacgctcaatcccacgcgagtagagcacagtaaccttcaaataagcgaatggggcataatcagaaatccgaaataaacctaggggcattatcggaaatgaaaagtagctcactcaatataaaaatctaggaaccctagttttcgttatcactctgtgctccctcgctctatttctcagtctctgtgtttgcggctgaggattccgaacgagtgaccttcttcgtttctcgcaaaggtaacagcctctgctcttgtctcttcgattcgatctatgcctgtctcttatttacgatgatgtttcttcggttatgtttttttatttatgctttatgctgttgatgttcggttgtttgtttcgctttgtttttgtggttcagttttttaggattcttttggtttttgaatcgattaatcggaagagattttcgagttatttggtgtgttggaggtgaatcttttttttgaggtcatagatctgttgtatttgtgttataaacatgcgactttgtatgattttttacgaggttatgatgttctggttgttttattatgaatctgttgagacagaaccatgatttttgttgatgttcgtttacactattaaaggtttgttttaacaggattaaaagttttttaagcatgttgaaggagtcttgtagatatgtaaccgtcgatagtttttttgtgggtttgttcacatgttatcaagcttaatcttttactatgtatgcgaccatatctggatccagcaaaggcgattttttaattccttgtgaaacttttgtaatatgaagttgaaattttgttattggtaaactataaatgtgtgaagttggagtatacctttaccttcttatttggctttgtgatagtttaatttatatgtattttgagttctgacttgtatttctttgaattgattctagtttaagtaatccatggcacctaaaaagaagaggaaagttatggacaaaaagtactccatagggctcgatatcggcacaaacagtgtggggtgggcagtcatcactgacgactacaaggtcccctccaagaagttcaaggtcctcggcaatacagaccgccactccatcaagaagaacctcatcggagcactgttgttcgactccggagaaactgccgaagcaaccagactcaagaggaccgccagaagaaggtacacaaggcgcaagaacaggatctgctacctccaggagatcttcagtaacgagatggcaaaggtcgacgactctttcttccacaggctcgaggaatccttcctcgtcgaggaggacaagaagcatgagagacaccccatcttcggaaacatcgtcgacgaggtaagtttctgcttctacctttgatatatatataataattatcattaattagtagtaatataatatttcaaatatttttttcaaaataaaagaatgtagtatatagcaattgcttttctgtagtttataagtgtgtatattttaatttataacttttctaatatatgaccaaaacatggtgatgtgcaggtcgcctaccacgagaagtacccaaccatctaccacctgaggaagaagctcgtcgacagtaccgacaaggctgacctcaggctcatctacctcgcactcgcccacatgattaagttcaggggccacttcctcatagagggagacctcaacccagacaactccgacgtcgacaaactcttcatccaactcgtgcagacctacaatcaactctttgaagagaacccaatcaacgcctccggagtggatgctaaggctatattgtccgccaggctctccaaatcaagacgcctcgaaaacctcatcgcccagctcccaggggagaagaaaaatagcctcttcgggaacctcatagccctgtcccttggactcacccctaacttcaaatcaaatttcgacctcgcagaggacgctaagcttcaactctccaaggacacctacgacgacgacctcgataacctcctcgcccaaatcggtgatcaatacgctgacctcttcctcgctgctaagaacctctccgacgccatactcctctccgacattctgagggtcaacaccgagatcacaaaggctcccttgtccgcctccatgattaaacgctacgacgaacaccaccaggacctcaccctcttgaaggcactggttagacagcagctccccgagaagtacaaggaaatcttcttcgaccaatcaaaaaacggctacgccggatacatcgacggaggagcatcccaggaagagttctacaagttcatcaaaccaattctcgaaaagatggacggaacagaggagctcttggtcaagctcaacagggaggacctcctcagaaagcagagaaccttcgacaacggcagtatcccccaccagatccaccttggagagttgcacgcaatcctcaggaggcaagaggacttctaccccttcctcaaggacaacagggagaagatcgagaagatccttacattccgcatcccctactacgtcggacctttggcaagaggaaactcccgcttcgcatggatgactcgcaagagtgaggaaaccatcaccccttggaacttcgaggaggtcgtcgataagggagcttcagcccagtccttcatcgagcgcatgaccaacttcgataaaaatctccccaatgaaaaagtcctccccaagcacagtctgctctacgagtacttcacagtctacaacgagctcaccaaggtcaagtacgtcaccgaaggcatgagaaaacccgccttcctcagtggcgagcagaagaaggcaatcgtggacttgctgttcaagaccaaccgcaaggtcacagtcaagcaattaaaagaggactacttcaagaaaatagagtgcttcgacagtgtcgagatctctggggtcgaggacaggttcaacgcatccttggggacctatcacgacctcctcaagatcattaaagacaaggacttcctcgacaacgaggagaacgaggacatactggaggacatcgtcctcaccctcactctctttgaggacagggagatgatagaggagcgcctcaaaacctacgcccacctcttcgacgacaaggtgatgaaacagctcaagaggcgcagatacaccggatggggtagactctccaggaagctgattaatggcatccgcgacaaacagtccggcaagaccatcctcgacttcctcaagagtgacggattcgccaaccgcaacttcatgcagctcatacacgacgactccctcaccttcaaggaggacatccaaaaagcccaagtctccggacagggagactcattgcacgaacacatcgccaacttggctggatctcctgctattaaaaagggcatcctccaaaccgtcaaggtggtcgacgaactcgtcaaggtcatgggtagacacaagcccgaaaatatcgtcatcgagatggcaagggagaaccagacaacccagaagggccaaaaaaactccagggagcgcatgaaacgcatcgaggagggaataaaggagctcgggtcccagatcctcaaggagcaccccgtcgaaaatactcaactccagaatgaaaagctctacctctactacctccaaaacggcagggatatgtacgtcgaccaagagctcgacattaatcgcctctccgactacgacgtcgatcacatcgtcccccagagtttcctcaaggacgactccatcgacaacaaggtcctcaccagatccgataaaaatcgcggaaagtccgacaacgtcccctctgaggaagtggttaagaagatgaaaaactactggagacagctcctcaacgcaaagctgatcacccagcgcaagttcgacaacctcacaaaggctgagagagggggactctctgagttggacaaggccggcttcatcaagagacaactcgtggaaacccgccagatcaccaagcatgtcgcacagattctcgactcccgcatgaatactaaatacgatgaaaatgacaagctcatcagggaggtcaaggtcatcaccctgaagtccaagctcgtctccgacttccgcaaggacttccagttctacaaggtccgcgagatcaacaactaccaccacgcccacgacgcatacctcaacgctgtggttggaacagcactcatcaagaagtaccccaagctcgagtccgagttcgtctacggcgactacaaggtctacgacgtcaggaagatgatcgccaagtccgagcaagagatcggaaaggccaccgcaaaatatttcttctactccaacataatgaacttcttcaaaaccgagatcaccctggctaacggagaaataaggaagaggcccctgatagaaaccaacggcgagacaggcgagattgtctgggacaaaggcagggacttcgcaaccgtcagaaaggtgctcagtatgcctcaggtcaacatagtcaaaaagaccgaagtccagactggaggattctccaaggagtccatcctccccaaaaggaactccgacaaactgatcgccaggaaaaaggactgggaccccaaaaaatatggcggcttcgactcccctactgttgcttacagtgtgctcgtcgtcgcaaaagtcgagaaggggaaatccaagaagctcaagtcagtgaaggagctcctcggcatcaccatcatggagaggtcctccttcgagaagaaccccatcgacttcctcgaggccaagggatataaggaggtcaagaaggacctcatcattaaactccccaagtactccctcttcgagctcgaaaacggacgcaagaggatgctcgcttcagctggtgaactccagaagggcaacgaactcgctttgccctctaaatacgtcaacttcctctacctcgcctcccactatgaaaagctcaagggctccccagaggacaacgagcagaagcaactcttcgtcgagcagcacaagcattacctcgacgagatcatcgagcagatctccgagttctccaagagagtcatcctcgctgacgcaaacctcgacaaggtcctcagtgcatataacaagcaccgcgacaaaccaataagggagcaggccgaaaatattatacacctgttcaccctcaccaacttgggagcaccagccgccttcaagtatttcgacaccaccatcgacagaaagcgctacacctccacaaaggaggtcctggacgccacacttatccaccagtccatcaccggcctctatgaaacacgcatcgacctctctcaattgggaggggacaagagaccaagagacagacacgatggagagcttggaggtagaaagagagcaaggtagttcgaactggccaggtaccgttaacctagacttgtccatcttctggattggccaacttaattaatgtatgaaataaaaggatgcacacatagtgacatgctaatcactataatgtgggcatcaaagttgtgtgttatgtgtaattactagttatctgaataaaagagaaagagatcatccatatttcttatcctaaatgaatgtcacgtgtctttataattctttgatgaaccagatgcatttcattaaccaaatccatatacatataaatattaatcatatataattaatatcaattgggttagcaaaacaaatctagtctaggtgtgttttgcaagcttggcgcgccgttaacttaacggcaaacgctaattagtcactaggcccaggaaacactaactaagccctagcttatcctagcgcaacctagttaggtcttggtaacccgaaatctagtctaggtgtgttttgcgatccgatatcgatgcggccgcatcaggatattcttgtttaagatgttgaactctatggaggtttgtatgaactgatgatctaggaccggataagttcccttcttcatagcgaacttattcaaagaatgttttgtgtatcattcttgttacattgttattaatgaaaaaatattattggtcattggactgaacacgagtgttaaatatggaccaggccccaaataagatccattgatatatgaattaaataacaagaataaatcgagtcaccaaaccacttgccttttttaacgagacttgttcaccaacttgatacaaaagtcattatcctatgcaaatcaataatcatacaaaaatatccaataacactaaaaaattaaaagaaatggataatttcacaatatgttatacgataaagaagttacttttccaagaaattcactgattttataagcccacttgcattagataaatggcaaaaaaaaacaaaaaggaaaagaaataaagcacgaagaattctagaaaatacgaaatacgcttcaatgcagtgggacccacggttcaattattgccaattttcagctccaccgtatatttaaaaaataaaacgataatgctaaaaaaatataaatcgtaacgatcgttaaatctcaacggctggatcttatgacgaccgttagaaattgtggttgtcgacgagtcagtaataaacggcgtcaaagtggttgcagccggcacacacgagtcgtgtttatcaactcaaagcacaaatacttttcctcaacctaaaaataaggcaattagccaaaaacaactttgcgtgtaaacaacgctcaatacacgtgtcattttattattagctattgcttcaccgccttagctttctcgtgacctagtcgtcctcgtcttttcttcttcttcttctataaaacaatacccaaagagctcttcttcttcacaattcagatttcaatttctcaaaatcttaaaaactttctctcaattctctctaccgtgatcaaggtaaatttctgtgttccttattctctcaaaatcttcgattttgttttcgttcgatcccaatttcgtatatgttctttggtttagattctgttaatcttagatcgaagacgattttctgggtttgatcgttagatatcatcttaattctcgattagggtttcatagatatcatccgatttgttcaaataatttgagttttgtcgaataattactcttcgatttgtgatttctatctagatctggtgttagtttctagtttgtgcgatcgaatttgtcgattaatctgagtttttctgattaacagccatggctgcaactactcttacatctgctttacctggtgctttcagttcatcccagagaccaagtgctcctttcaacttacaaagatcacctagagtgcttagaaggttcaacagaaagacaggacgtcaacctcgtggacttgttcgtgctgcaaaggctcaagcggcgcaaaacctgccagagaaattcgatgaaacaagactctgggaggccctcaggggatttggggttagtccaagtagggttacttacgctcccgtcggattcggagattaccactggaccgtcacagatgaagacgggagaccttggttcgcaactgtcagtgacctcgaacacaaagagcattgcgggcagggagcacaagcagcccttaaaggactcagacaagctatggacactgccctcgcacttagagatagggacggactcagattcgtggttgctccagtggcagcaacagatgggggtggccctgtccttccccttgacgctaggtatgcactcacagtcttccctcacgtcccaggaagaacaggagagttcggacaaagactcacagaggcagagagggacagactgcttgctcttctggcagaactccacggaagaacacctcctgaaacaaccccaccagccgatatggaaccaccaggacttcctggtgttagagcagcactcgccgaaagtgaaggaccttggagtggaggaccatttgcagaacccgctagacttcttctcagagaacacgaggccacactgcacgcaagactcgctgaattcgaagccctcgtcgcaagagttaagggtcgtggagcacctcttgtcgttacccacggagaaccacacccaggcaacttgatcctcggagaggaaggctatctcctcgtggactgggatacagttggactggctccagctgaaagggatttgagtctcatctcagacgacccagctgacctcgcaagatacgcagagcttacaggaagaactccagacccagacgcactcgcactctatagactgcgttggagtctccttgatgtggctgagttcgtcgagtggttcagggctgaacaccaaagaacccaagacaccgagagtgcatggaaggggttcactgacacacttgggcaattggctgctggtggatcagctgcatagcctaggaaacttatctctgttatgaatcagaagaagttcatgtctcgtttcatttaaaactttggtggtttgtgttttggggccttgtaaagcccctgatgaataattgttcaactatgtttccgttcctgtgttatacctttctttctaatgagtaatgacatcaaacttcttctgtattgaaattatgtccttgtgagtctctttatcatcgtttcgtctttacattatatgtgctacttttgtctaatgagcctgaaaagtggctccaatggtacgcactggaagatttgttggcttctggtagatatagcgacagtgttgagcttgtaatatcatgtctcttattgctaaattagttcctttcttaacagaaaccttcaaagtttttgtttttgttttcatttacctaatgtacacatacgctggccatgactaacaacatgtccaggcttagagcatatttttttctagcttaaattgttaacttgtcattcagtaaaatccgagaattgtgaagctctaattgaagctaattcgttttataaagtcagttaaaaagtatactaaattatccaacttttcttcaaaatctcaaaattctatgacaaaacgatagtctttgtttatgtcagtaccacaaagaggtggaaaaaaacaccaaaaaaacaataagcaaactatacactgagaagaaaaataaaagagagctcaatagatgttttatactaacggtagattagatcaaagatccaagctttactctacatagagcagaacccagaatcccttcatatctcttttattctagcaccgataatctactgaaaagaagacacttagagctctgtctctttgtcaaagaagtcccagccgtcatccagaagctccttacgttcattaacagaggtaccggcggccgcgggcaactttattatacaaagttgatagatatcggtccgacggccagaatggccatctggattcagcaggcctagaaggccatttagtcctagcgatcgcgctgacaagcggtatttaaatcatcattctaggcgcgccacttacgcttgattccgatgacttcgtaggttcctagctcaagccgctcgtgtccaagcgtcacttacgattagctaatgattacggcatctaggaccgactagttcttatgtgcttctagtctccaaatgtggttgatagttattttgctctaagatcaacagtaatgaagtataaatcatcgttgtggtgtgctactcggttaattgagcattaacacacacaaacatgacgaggatggtataatctccaaaaatgtgtactttgttaggtgggaccctatagccttgattaatgtgctatgttaggcatgcctggaaacgtgtgacgcatatgttttgtgaacctgttgatattatatgtgcttttatattaccatattttattaaaatactaatatttattactagtaagatataacattctatctagcttaaaaactaaccataaatattccataataactagatttaccaaactaatatactaaatatacataataaatacaaaattaacaagacaataatcaatatttatgagcttaatatatttagacattatggttggtcgacgataatcatgctaacttttcgtaattgcttgattgaaatatgcttagaataatgcctctttgttctacatggcaaatagggaccattatggtgtaacaccctgggaaccacaaacaccccgaaatgctactaaactacacaactaaccttcatatataaaatttcgacagcatctcctttgaaaatttgcatagacgtggaagcaacagagtataaacagatctagctagctaagtttaaacggccggccaaacgtgcaagcgctactagacaattcagtacattaaaaacgtccgcaatgtgttattaagttgtctaagcgtcaatttatttacaattgaatatatcctgccaccagccagccaacagctccccgaccggcagctcggcacaaaatcaccactcgatacaggcagcccatcagtccgggacggcgtcagcgggagagccgttgtaaggcggcagactttgctcatgttaccgatgctattcggaagaacggcaactaagctgccgggtttgaaacacggatgatctcgcggagggtagcatgttgattgtaacgatgacagagcgttgctgcctgtgatcaaatatcatctccctcgcagagatccgaattatcagccttcttattcatttctcgcttaaccgtgacaggcgcgcgcggtgccacctgggtccttttcatcacgtgctataaaaataattataatttaaattttttaatataaatatataaattaaaaatagaaagtaaaaaaagaaattaaagaaaaaatagtttttgttttccgaagatgtaaaagactctagggggatcgccaacaaatactaccttttatcttgctcttcctgctctcaggtattaatgccgaattgtttcatcttgtctgtgtagaagaccacacacgaaaatcctgtgattttacattttacttatcgttaatcgaatgtatatctatttaatctgcttttcttgtctaataaatatatatgtaaagtacgctttttgttgaaattttttaaacctttgtttattttttttttcttcattccgtaactcttctaccttctttatttactttctaaaatccaaatacaaaacataaaaataaataaacacagagtaaattcccaaattattccatcattaaaagatacgaggcgcgtgtaagttacaggcaagcgatccgtcctaagaaaccattattatcatgacattaacctataaaaataggcgtatcacgaggccctttcgtctcgcgcgtttcggtgatgacggtgaaaacctctgacacatgcagctcccggagacggtcacagcttgtctgtaagcggatgccgggagcagacaagcccgtcagggcgcgtcagcgggtgttggcgggtgtcggggctggcttaactatgcggcatcagagcagattgtactgagagtgcaccataccacagcttttcaattcaattcatcattttttttttattcttttttttgatttcggtttctttgaaatttttttgattcggtaatctccgaacagaaggaagaacgaaggaaggagcacagacttagattggtatatatacgcatatgtagtgttgaagaaacatgaaattgcccagtattcttaacccaactgcacagaacaaaaacctgcaggaaacgaagataaatcatgtcgaaagctacatataaggaacgtgctgctactcatcctagtcctgttgctgccaagctatttaatatcatgcacgaaaagcaaacaaacttgtgtgcttcattggatgttcgtaccaccaaggaattactggagttagttgaagcattaggtcccaaaatttgtttactaaaaacacatgtggatatcttgactgatttttccatggagggcacagttaagccgctaaaggcattatccgccaagtacaattttttactcttcgaagacagaaaatttgctgacattggtaatacagtcaaattgcagtactctgcgggtgtatacagaatagcagaatgggcagacattacgaatgcacacggtgtggtgggcccaggtattgttagcggtttgaagcaggcggcagaagaagtaacaaaggaacctagaggccttttgatgttagcagaattgtcatgcaagggctccctatctactggagaatatactaagggtactgttgacattgcgaagagcgacaaagattttgttatcggctttattgctcaaagagacatgggtggaagagatgaaggttacgattggttgattatgacacccggtgtgggtttagatgacaagggagacgcattgggtcaacagtatagaaccgtggatgatgtggtctctacaggatctgacattattattgttggaagaggactatttgcaaagggaagggatgctaaggtagagggtgaacgttacagaaaagcaggctgggaagcatatttgagaagatgcggccagcaaaactaaaaaactgtattataagtaaacgcgcgcgggcgcgccttttcagcctgatacagattaaatcagaacgcagaagcggtctgataaaacagaatttgcctggcggcagtagcgcggtggtcccacctgaccccatgccgaactcagaagtgaaacgccgtagcgccgatggtagtgtggggtctccccatgcgagagtagggaactgccaggcatcaaataaaacgaaaggctcagtcgaaagactgggcctttcgttttatctgttgtttgtcggtgaacgctctcctgagtaggacaaatccgccgggagcggatttgaacgttgcgaagcaacggcccggagggtggcgggcaggacgcccgccataaactgccaggcatcaaattaagcagaaggccatcctgacggatggcctttttgcgtttctacaaactcttaccgcacccggagcgggcgcgaggccgccaaggcccgaggcgtgaagtttggcccccgccctaccctcaccccggcacagatcgcgcacgcccgcgagctgatcgaccaggaaggccgcaccgtgaaagaggcggctgcactgcttggcgtgcatcgctcgaccctgtaccgcgcacttgagcgcagcgaggaagtgacgcccaccgaggccaggcggcgcggtgccttccgtgaggacgcattgaccgaggccgacgccctggcggccgccgagaatgaacgccaagaggaacaagcatgaaaccgcaccaggacggccaggacgaaccgtttttcattaccgaagagatcgaggcggagatgatcgcggccgggtacgtgttcgagccgcccgcgcacgtctcaaccgtgcggctgcatgaaatcctggccggtttgtctgatgccaagctggcggcctggccggccagcttggccgctgaagaaaccgagcgccgccgtctaaaaaggtgatgtgtatttgagtaaaacagcttgcgtcatgcggtcgctgcgtatatgatgcgatgagtaaataaacaaatacgcaaggggaacgcatgaaggttatcgctgtacttaaccagaaaggcgggtcaggcaagacgaccatcgcaacccatctagcccgcgccctgcaactcgccggggccgatgttctgttagtcgattccgatccccagggcagtgcccgcgattgggcggccgtgcgggaagatcaaccgctaaccgttgtcggcatcgaccgcccgacgattgaccgcgacgtgaaggccatcggccggcgcgacttcgtagtgatcgacggagcgccccaggcggcggacttggctgtgtccgcgatcaaggcagccgacttcgtgctgattccggtgcagccaagcccttacgacatatgggccaccgccgacctggtggagctggttaagcagcgcattgaggtcacggatggaaggctacaagcggcctttgtcgtgtcgcgggcgatcaaaggcacgcgcatcggcggtgaggttgccgaggcgctggccgggtacgagctgcccattcttgagtcccgtatcacgcagcgcgtgagctacccaggcactgccgccgccggcacaaccgttcttgaatcagaacccgagggcgacgctgcccgcgaggtccaggcgctggccgctgaaattaaatcaaaactcatttgagttaatgaggtaaagagaaaatgagcaaaagcacaaacacgctaagtgccggccgtccgagcgcacgcagcagcaaggctgcaacgttggccagcctcgcagacacgccagccatgaagcgggtcaactttcagttgccggcggaggatcacaccaagctgaagatgtacgcggtacgccaaggcaagaccattaccgagctgctatctgaatacatcgcgcagctaccagagtaaatgagcaaatgaataaatgagtagatgaattttagcggctaaaggaggcggcatggaaaatcaagaacaaccaggcaccgacgccgtggaatgccccatgtgtggaggaacgggcggttggccaggcgtaagcggctgggttgcctgccggccctgcaatggcactggaacccccaagcccgaggaatcggcgtgagcggtcgcaaaccatccggcccggtacaaatcggcgcggcgctgggtgatgacctggtggagaagttgaaggcagcgcaggccgcccagcggcaacgcatcgaggcagaagcacgccccggtgaatcgtggcaagcagccgctgatcgaatccgcaaagaatcccggcaaccgccggcagccggtgcgccgtcgattaggaagccgcccaagggcgacgagcaaccagattttttcgttccgatgctctatgacgtgggcacccgcgatagtcgcagcatcatggacgtggccgttttccgtctgtcgaagcgtgaccgacgagctggcgaggtgatccgctacgagcttccagacgggcacgtagaggtttccgcagggccggcaggcatggccagtgtgtgggattacgacctggtactgatggcggtttcccatctaaccgaatccatgaaccgataccgggaagggaagggagacaagcccggccgcgtgttccgtccacacgttgcggacgtactcaagttctgccggcgagccgatggcggaaagcagaaagacgacctggtagaaacctgcattcggttaaacaccacgcacgttgccatgcagcgtacgaagaaggccaagaacggccgcctggtgacggtatccgagggtgaagccttgattagccgctacaagatcgtaaagagcgaaaccgggcggccggagtacatcgagatcgagctagctgattggatgtaccgcgagatcacagaaggcaagaacccggacgtgctgacggttcaccccgattactttttgatcgatcccggcatcggccgttttctctaccgcctggcacgccgcgccgcaggcaaggcagaagccagatggttgttcaagacgatctacgaacgcagtggcagcgccggagagttcaagaagttctgtttcaccgtgcgcaagctgatcgggtcaaatgacctgccggagtacgatttgaaggaggaggcggggcaggctggcccgatcctagtcatgcgctaccgcaacctgatcgagggcgaagcatccgccggttcctaatgtacggagcagatgctagggcaaattgccctagcaggggaaaaaggtcgaaaaggtctctttcctgtggatagcacgtacattgggaacccaaagccgtacattgggaaccggaacccgtacattgggaacccaaagccgtacattgggaaccggtcacacatgtaagtgactgatataaaagagaaaaaaggcgatttttccgcctaaaactctttaaaacttattaaaactcttaaaacccgcctggcctgtgcataactgtctggccagcgcacagccgaagagctgcaaaaagcgcctacccttcggtcgctgcgctccctacgccccgccgcttcgcgtcggcctatggcgcgccggaaaatatgcatggcatgcccgttccatacagaagctgggcgaacaaacgatgctcgccttccagaaaaccgaggatgcgaaccacttcatccggggtcagcaccaccggcaagcgccgcgacggccgaggtcttccgatctcctgaagccagggcagatccgtgcacagcaccttgccgtagaagaacagcaaggccgccaatgcctgacgatgcgtggagaccgaaaccttgcgctcgttcgccagccaggacagaaatgcctcgacttcgctgctgcccaaggttgccgggtgacgcacaccgtggaaacggatgaaggcacgaacccagtggacataagcctgttcggttcgtaagctgtaatgcaagtagcgtatgcgctcacgcaactggtccagaaccttgaccgaacgcagcggtggtaacggcgcagtggcggttttcatggcttgttatgactgtttttttggggtacagtctatgcctcgggcatccaagcagcaagcgcgttacgccgtgggtcgatgtttgatgttatggagcagcaacgatgttacgcagcagggcagtcgccctaaaacaaagttaaacatcatgagggaagcggtgatcgccgaagtatcgactcaactatcagaggtagttggcgtcatcgagcgccatctcgaaccgacgttgctggccgtacatttgtacggctccgcagtggatggcggcctgaagccacacagtgatattgatttgctggttacggtgacggtaaggcttgatgaaacaacgcggcgagctttgatcaacgaccttttggaaacttcggcttcccctggagagagcgagattctccgcgctgtagaagtcaccattgttgtgcacgacgacatcattccgtggcgttatccagctaagcgcgaactgcaatttggggaatggcagcgcaatgacattcttgcaggtatcttcgagccagccacgatcgacattgatctggctatcttgctgacaaaagcaagagaacatagcgttgccttggtaggtccagcggcggaggaactctttgatccggttcctgaacaggatctatttgaggcgctaaatgaaaccttaacgctatggaactcgccgcccgactgggctggcgatgagcgaaatgtagtgcttacgttgtcccgcatttggtacagcgcagtaaccggcaaaatcgcgccgaaggatgtcgctgccgactgggcaatggagcgcctgccggcccagtatcagcccgtcatacttgaagctagacaggcttatcttggacaagaagaagatcgcttggcctcgcgcgcagatcagttggaagaatttgtccactacgtgaaaggcgagatcaccaaggtagtcggcaaataatgtctaacaattcgttcaagccgacgccgcttcgcggcgcggcttaactcaagcgttagatgcactatacgtaaccaactagtaggaacagtgaattggagttcgtcttgttataattagcttcttgggggatctttaaatactgtagaaaagaggaaggaaataataaatggctaaaatgagaatatcaccggaattgaaaaaactgatcgaaaaataccgctgcgtaaaagatacggaaggaatgtctcctgctaaggtatataagctggtgggagaaaatgaaaacctatatttaaaaatgacggacagccggtataaagggaccacctatgatgtggaacgggaaaaggacatgatgctatggctggaaggaaagctgcctgttccaaaggtcctgcactttgaacggcatgatggctggagcaatctgctcatgagtgaggccgatggcgtcctttgctcggaagagtatgaagatgaacaaagccctgaaaagattatcgagctgtatgcggagtgcatcaggctctttcactccatcgacatatcggattgtccctatacgaatagcttagacagccgcttagccgaattggattacttactgaataacgatctggccgatgtggattgcgaaaactgggaagaagacactccatttaaagatccgcgcgagctgtatgattttttaaagacggaaaagcccgaagaggaacttgtcttttcccacggcgacctgggagacagcaacatctttgtgaaagatggcaaagtaagtggctttattgatcttgggagaagcggcagggcggacaagtggtatgacattgccttctgcgtccggtcgatcagggaggatatcggggaagaacagtatgtcgagctattttttgacttactggggatcaagcctgattgggagaaaataaaatattatattttactggatgaattgttttagtacctagatacttcgctcgtgaaaagcagcgctcagggggctagtgcgctcttccgcttcctcgctcactgactcgctgcgctcggtcgttcggctgcggcgagcggtatcagctcactcaaaggcggtaatacggttatccacagaatcaggggataacgcaggaaagaacatgtgagcaaaaggccagcaaaaggccaggaaccgtaaaaaggccgcgttgctggcgtttttccataggctccgcccccctgacgagcatcacaaaaatcgacgctcaagtcagaggtggcgaaacccgacaggactataaagataccaggcgtttccccctggaagctccctcgtgcgctctcctgttccgaccctgccgcttaccggatacctgtccgcctttctcccttcgggaagcgtggcgctttctcatagctcacgctgtaggtatctcagttcggtgtaggtcgttcgctccaagctgggctgtgtgcacgaaccccccgttcagcccgaccgctgcgccttatccggtaactatcgtcttgagtccaacccggtaagacacgacttatcgccactggcagcagccactggtaacaggattagcagagcgaggtatgtaggcggtgctacagagttcttgaagtggtggcctaactacggctacactagaagaacagtatttggtatctgcgctctgctgaagccagttaccttcggaaaaagagttggtagctcttgatccggcaaacaaaccaccgctggtagcggtggtttttttgtttgcaagcagcagattacgcgcagaaaaaaaggatctcaagaagatcctttgatcttttctacggggtctgacgctcagtggaacgaaaactcacgttaagggattttggtcatgagattatcaaaaaggatcttcacctagatccttttaaattaaaaatgaagcgtacgttggaatcgcttctacaaaa

SEQ ID NO: 99 - DNA, 26340 bp, Artificial Sequence
  Nucleotide sequence of Vector 11
ctcacagaaacaatcaaacaaacatacacagcgatttattcacacgaacccgaattacaacggtatatatcctgtcagccaacaccaaaacatcaaaaaaatcgggatcaggatcaggatctgcggccgcatcctgcaggagctcaaacgagcaggaagcaacgagagggtggcgcgcgaccgacgtgcgtacgtagcatgagcctgagtggagacgttggacgtgtatgtatatacctctctgcgtgttaactatgtacgtaagcggcaggcagtgcaataagtgtggctctgtagtatgtacgtgcgggtacgatgctgtaagctactgaggcaagtccataaataaataatgacacgtgcgtgttctataatctcttcgcttcttcatttgtccccttgcggagtttggcatccattgatgccgttacgctgagaacagacacagcagacgaaccaaaagtgagttcttgtatgaaactatgacccttcatcgctaggctcaaacagcaccccgtacgaacacagcaaattagtcatctaactattagcccctacatgtttcagacgatacataaatatagcccatccttagcaattagctattggccctgcccatcccaagcaatgatctcgaagtatttttaatatatagtatttttaatatgtagcttttaaaattagaagataattttgagacaaaaatctccaagtatttttttgggtattttttactgcctccgtttttctttatttctcgtcacctagtttaattttgtgctaatcggctataaacgaaacagagagaaaagttactctaaaagcaactccaacagattagatataaatcttatatcctgcctagagctgttaaaaagatagacaactttagtggattagtgtatgcaacaaactctccaaatttaagtatcccaactacccaacgcatatcgttcccttttcattggcgcacgaactttcacctgctatagccgacgtacatgttcgttttttttgggcggcgcttactttcttccccgttcgttctcagcatcgcaactcaatttgttatggcggagaagcccttgtatcccaggtagtaatgcacagatatgcattattattattcataaaacgaacgctcttcaactggaagagcggttactaccggttcactagctagctgctaatcgagctagttaccctatgaggtgacatgaagcgctcacggttactatgacggttagcttcacgactgttggtggcagtagcgtacgacttagctatagttccggacttacctagctaggttacctcgagcgaccccagtgatggcaactaagtggatcaacagcaacttttgctccgatttgcgatataatttgtcaaaacatgcctctaaaatcactctaacatcaaatttcttgaataacaattttatacactcccctcctccaacttgttatgtgcccttctgacccttcttgttttgtttgctagttaaccatgtaggaaaaagtatcactccactcaatagtattttcacttcatctggccataaataattttggcctaattcagcatcacgtatcaggagtcaataagcttgtctgtccgtctgtatttatcatctctcttcgtgctactatcacctccccttttcttatggatttttcctgttaaaaaacaaaaaggaacaggtaacccacttgaattaggacaccaatgtaggtgccaccacccgtttccttctgttgagtgtgcacgcttattggttcaacctcagaattaaattcttcataatcccctgttgagagaaaattataatagacaaatcaaattgtgtggacttgccatttcccaaaacattttcattttgtgcgcgtgtgggtggtggggtgcgttttattagaatgaagactgtaaaaaagaggagtgtaggatgataagaagtagtaaatgtcagttgtcaaaagatgaaaagcaacggaggaagggaccaaaccttgacctatggaaaactgagtgctatggtaattattgtcacaggatttaggatgattaataatagttcggaccacaaataaacagctttaagaagttcaactttcccccacggatagcaaatttggttggaccatctttgatgaaagtccccaatctcataattgccaaccttttttatacgaaactagtattttcataattatcaagaatcttcaactcatcagtgatcgctcatttctgattaagaaaaaaaaagggtgagtaaatgaatccattttgtctgttctccatggatctcgacccgggtgattgcggttacatcatgtacggaaaaataattctaatccttgatttaaatttgaacttgactatttatttattctttatttcattttgtaaatcattttatgtatctcctggcaagcaattttatccaccttgcaccaacaccttcgggttccataatcaaaccaccttaacttcacaccatgctgtaactcacaccgcccagcatctccaatgtgaaagaagctaaaatttaataaacaatcatacgaagcagtgacaaaataccagatggtattaatgcttcgataaaattaattggaaagtataaaatggtagaaaataataaattataattaatttaagtaagataaaaaataattaaaaactaaaatgttaaaattttaaaaaaattattttaaataatatttaaaaacattaaaaatcattttaaaaaatttatttatagaacaattaaataaatatttcagctaataaaaaacaaaagcttacctagccttagaagacaacttgtccaacaattagatgatacccattgcccttacgttttctttaacatcaattattgtttttgtcaacaagctatcttttagttttattttattggtaaaaaatatgtcgccttcaagttgcatcatttaacacatctcgtcattagaaaaataaaactcttccctaaacgattagtagaaaaaatcattcgataataaataagaaagaaaaattagaaaaaaataacttcattttaaaaaaatcattaaggctatattttttaaatgactaattttatatagactgtaactaaaagtatacaatttattatgctatgtatcttaaagaattacttataaaaatctacggaagaatatcttacaaagtgaaaaacaaatgagaaagaatttagtgggatgattatgattttatttgaaaattgaaaaaataattattaaagactttagtggagtaagaaagctttcctattagtcttttcttatccataaaaaaaaaaaaaaaaatctagcgtgacagcttttccatagattttaataatgtaaaatactggtagcagccgaccgttcaggtaatggacactgtggtcctaacttgcaacgggtgcgggcccaatttaataacgccgtggtaacggataaagccaagcgtgaagcggtgaaggtacatctctgactccgtcaagattacgaaaccgtcaactacgaaggactccccgaaatatcatctgtgtcataaacaccaagtcacaccatacatgggcacgcgtcacaatatgattggagaacggttccaccgcatatgctataaaatgcccccacacccctcgaccctaatcgcacttcaattgcaatcaaattagttcattctctttgcgcagttccctacctctcctttcaaggttcgtagatttcttccgtttttttttcttcttctttattgtttgttctacatcagcatgatgttgatttgattgtgttttctatcgtttcatcgattataaattttcataatcagaagattcagcttttattaatgcaagaacgtccttaattgatgattttataaccgtaaattaggtctaattagagtttttttcataaagattttcagatccgtttacaacaagccttaattgttgattctgtagtcgtagattaaggtttttttcatgaactacttcagatccgttaaacaacagccttatttgttgatacttcagtcgtttttcaagaaattgttcagatccgttgataaaagccttattcgttgattctgtatggtatttcaagagatattgctcaggtcctttagcaactaccttatttgttgattctgtggccatagattaggattttttttcacgaaattgcttcttgaaattacgtgatggattttgattctgatttatcttgtgattgttgactctacagccatggcccacagcaagcacggcctgaaggaggagatgaccatgaagtaccacatggagggctgcgtgaacggccacaagttcgtgatcaccggcgagggcatcggctaccccttcaagggcaagcagaccatcaacctgtgcgtgatcgagggcggccccctgcccttcagcgaggacatcctgagcgccggcttcaagtacggcgaccggatcttcaccgagtacccccaggacatcgtggactacttcaagaacagctgccccgccggctacacctggggccggagcttcctgttcgaggacggcgccgtgtgcatctgtaacgtggacatcaccgtgagcgtgaaggagaactgcatctaccacaagagcatcttcaacggcgtgaacttccccgccgacggccccgtgatgaagaagatgaccaccaactgggaggccagctgcgagaagatcatgcccgtgcctaagcagggcatcctgaagggcgacgtgagcatgtacctgctgctgaaggacggcggccggtaccggtgccagttcgacaccgtgtacaaggccaagagcgtgcccagcaagatgcccgagtggcacttcatccagcacaagctgctgcgggaggaccggagcgacgccaagaaccagaagtggcagctgaccgagcacgccatcgccttccccagcgccctggcctgagagctcgaatttccccgatcgttcaaacatttggcaataaagtttcttaagattgaatcctgttgccggtcttgcgatgattatcatataatttctgttgaattacgttaagcatgtaataattaacatgtaatgcatgacgttatttatgagatgggtttttatgattagagtcccgcaattatacatttaatacgcgatagaaaacaaaatatagcgcgcaaactaggataaattatcgcgcgcggtgtcatctatgttactagatcgggaattctagtggccggcccagctgatatcatgtcgtgcttagcacgtgatgcatcatagatgcggtaaattattactttctgtgactgggacaatgtgctcctccagtggccacgtatcggtaaaccttgtgccagaacactaatatttatataatcaacaataaagaatggtaagcattagacaaagacaaaaacaatttttaataatttacctgtactaattagaaggggtttgatttaattttattaaacttaacatgtgcaatatgtccctttgtttagaggaaaacaattacggtatttccttactaacgtaaactctgaatataatcatacatctgtattctgaaaaagaaaaaagaactagagataaaagcgtagaaacaacagtatgtggtcatagtcatacacgtaaagggatgaaaattgaaaatagaacctgcaggaaataagtttgcatttaatttggatatatatcttgaagtgtaaggttaacctctcagctattaaatagtactactactaacactcaaatagtacttctactagcactcacggtaacaatctcttagtagggatgggaataggccagatcggcctacaggggtctacgacttgacttcgttgaacaacggaaactcgacttgccttccgcacaatacatcatttcttcttagctttttttcttcttcttcgttcatacagtttttttttgtttatcagcttacattttcttgaaccgtagctttcgttttcttctttttaactttccattcggagtttttgtatcttgtttcatagtttgtcccaggattagaatgattaggcatcgaaccttcaagaatttgattgaataaaacatcttcattcttaagatatgaagataatcttcaaaaggcccctgggaatctgaaagaagagaagcaggcccatttatatgggaaagaacaatagtatttcttatataggcccatttaagttgaaaacaatcttcaaaagtcccacatcgcttagataagaaaacgaagctgagtttatatacagctagagtcgaagtagtgattggtgctaagcacgacatccagttttagagctagaaatagcaagttaaaataaggctagtccgttatcaacttgaaaaagtggcaccgagtcggtgcttttttttcggaccgggttaccagtctaaaaacggcccctaactaacgcttagttgcccgctagattagtcccccgttagtgcctagttagacacacgacgaactaggggctactagtagcggccgcaattggatcgggtttacttattttgtgggtatctatacttttattagatttttaatcaggctcctgatttctttttatttcgattgaattcctgaacttgtattattcagtagatcgaataaattataaaaagataaaatcataaaataatattttatcctatcaatcatattaaagcaatgaatatgtaaaattaatcttatctttattttaaaaaatcatataggtttagtatttttttaaaaataaagataggattagttttactattcactgcttattacttttaaaaaaatcataaaggtttagtatttttttaaaataaatataggaatagttttactattcactgctttaatagaaaaatagtttaaaatttaagatagttttaatcccagcatttgccacgtttgaacgtgagccgaaacgatgtcgttacattatcttaacctagctgaaacgatgtcgtcataatatcgccaaatgccaactggactacgtcgaacccacaaatcccacaaagcgcgtgaaatcaaatcgctcaaaccacaaaaaagaacaacgcgtttgttacacgctcaatcccacgcgagtagagcacagtaaccttcaaataagcgaatggggcataatcagaaatccgaaataaacctaggggcattatcggaaatgaaaagtagctcactcaatataaaaatctaggaaccctagttttcgttatcactctgtgctccctcgctctatttctcagtctctgtgtttgcggctgaggattccgaacgagtgaccttcttcgtttctcgcaaaggtaacagcctctgctcttgtctcttcgattcgatctatgcctgtctcttatttacgatgatgtttcttcggttatgtttttttatttatgctttatgctgttgatgttcggttgtttgtttcgctttgtttttgtggttcagttttttaggattcttttggtttttgaatcgattaatcggaagagattttcgagttatttggtgtgttggaggtgaatcttttttttgaggtcatagatctgttgtatttgtgttataaacatgcgactttgtatgattttttacgaggttatgatgttctggttgttttattatgaatctgttgagacagaaccatgatttttgttgatgttcgtttacactattaaaggtttgttttaacaggattaaaagttttttaagcatgttgaaggagtcttgtagatatgtaaccgtcgatagtttttttgtgggtttgttcacatgttatcaagcttaatcttttactatgtatgcgaccatatctggatccagcaaaggcgattttttaattccttgtgaaacttttgtaatatgaagttgaaattttgttattggtaaactataaatgtgtgaagttggagtatacctttaccttcttatttggctttgtgatagtttaatttatatgtattttgagttctgacttgtatttctttgaattgattctagtttaagtaatccatggcacctaaaaagaagaggaaagttatggacaaaaagtactccatagggctcgatatcggcacaaacagtgtggggtgggcagtcatcactgacgactacaaggtcccctccaagaagttcaaggtcctcggcaatacagaccgccactccatcaagaagaacctcatcggagcactgttgttcgactccggagaaactgccgaagcaaccagactcaagaggaccgccagaagaaggtacacaaggcgcaagaacaggatctgctacctccaggagatcttcagtaacgagatggcaaaggtcgacgactctttcttccacaggctcgaggaatccttcctcgtcgaggaggacaagaagcatgagagacaccccatcttcggaaacatcgtcgacgaggtaagtttctgcttctacctttgatatatatataataattatcattaattagtagtaatataatatttcaaatatttttttcaaaataaaagaatgtagtatatagcaattgcttttctgtagtttataagtgtgtatattttaatttataacttttctaatatatgaccaaaacatggtgatgtgcaggtcgcctaccacgagaagtacccaaccatctaccacctgaggaagaagctcgtcgacagtaccgacaaggctgacctcaggctcatctacctcgcactcgcccacatgattaagttcaggggccacttcctcatagagggagacctcaacccagacaactccgacgtcgacaaactcttcatccaactcgtgcagacctacaatcaactctttgaagagaacccaatcaacgcctccggagtggatgctaaggctatattgtccgccaggctctccaaatcaagacgcctcgaaaacctcatcgcccagctcccaggggagaagaaaaatagcctcttcgggaacctcatagccctgtcccttggactcacccctaacttcaaatcaaatttcgacctcgcagaggacgctaagcttcaactctccaaggacacctacgacgacgacctcgataacctcctcgcccaaatcggtgatcaatacgctgacctcttcctcgctgctaagaacctctccgacgccatactcctctccgacattctgagggtcaacaccgagatcacaaaggctcccttgtccgcctccatgattaaacgctacgacgaacaccaccaggacctcaccctcttgaaggcactggttagacagcagctccccgagaagtacaaggaaatcttcttcgaccaatcaaaaaacggctacgccggatacatcgacggaggagcatcccaggaagagttctacaagttcatcaaaccaattctcgaaaagatggacggaacagaggagctcttggtcaagctcaacagggaggacctcctcagaaagcagagaaccttcgacaacggcagtatcccccaccagatccaccttggagagttgcacgcaatcctcaggaggcaagaggacttctaccccttcctcaaggacaacagggagaagatcgagaagatccttacattccgcatcccctactacgtcggacctttggcaagaggaaactcccgcttcgcatggatgactcgcaagagtgaggaaaccatcaccccttggaacttcgaggaggtcgtcgataagggagcttcagcccagtccttcatcgagcgcatgaccaacttcgataaaaatctccccaatgaaaaagtcctccccaagcacagtctgctctacgagtacttcacagtctacaacgagctcaccaaggtcaagtacgtcaccgaaggcatgagaaaacccgccttcctcagtggcgagcagaagaaggcaatcgtggacttgctgttcaagaccaaccgcaaggtcacagtcaagcaattaaaagaggactacttcaagaaaatagagtgcttcgacagtgtcgagatctctggggtcgaggacaggttcaacgcatccttggggacctatcacgacctcctcaagatcattaaagacaaggacttcctcgacaacgaggagaacgaggacatactggaggacatcgtcctcaccctcactctctttgaggacagggagatgatagaggagcgcctcaaaacctacgcccacctcttcgacgacaaggtgatgaaacagctcaagaggcgcagatacaccggatggggtagactctccaggaagctgattaatggcatccgcgacaaacagtccggcaagaccatcctcgacttcctcaagagtgacggattcgccaaccgcaacttcatgcagctcatacacgacgactccctcaccttcaaggaggacatccaaaaagcccaagtctccggacagggagactcattgcacgaacacatcgccaacttggctggatctcctgctattaaaaagggcatcctccaaaccgtcaaggtggtcgacgaactcgtcaaggtcatgggtagacacaagcccgaaaatatcgtcatcgagatggcaagggagaaccagacaacccagaagggccaaaaaaactccagggagcgcatgaaacgcatcgaggagggaataaaggagctcgggtcccagatcctcaaggagcaccccgtcgaaaatactcaactccagaatgaaaagctctacctctactacctccaaaacggcagggatatgtacgtcgaccaagagctcgacattaatcgcctctccgactacgacgtcgatcacatcgtcccccagagtttcctcaaggacgactccatcgacaacaaggtcctcaccagatccgataaaaatcgcggaaagtccgacaacgtcccctctgaggaagtggttaagaagatgaaaaactactggagacagctcctcaacgcaaagctgatcacccagcgcaagttcgacaacctcacaaaggctgagagagggggactctctgagttggacaaggccggcttcatcaagagacaactcgtggaaacccgccagatcaccaagcatgtcgcacagattctcgactcccgcatgaatactaaatacgatgaaaatgacaagctcatcagggaggtcaaggtcatcaccctgaagtccaagctcgtctccgacttccgcaaggacttccagttctacaaggtccgcgagatcaacaactaccaccacgcccacgacgcatacctcaacgctgtggttggaacagcactcatcaagaagtaccccaagctcgagtccgagttcgtctacggcgactacaaggtctacgacgtcaggaagatgatcgccaagtccgagcaagagatcggaaaggccaccgcaaaatatttcttctactccaacataatgaacttcttcaaaaccgagatcaccctggctaacggagaaataaggaagaggcccctgatagaaaccaacggcgagacaggcgagattgtctgggacaaaggcagggacttcgcaaccgtcagaaaggtgctcagtatgcctcaggtcaacatagtcaaaaagaccgaagtccagactggaggattctccaaggagtccatcctccccaaaaggaactccgacaaactgatcgccaggaaaaaggactgggaccccaaaaaatatggcggcttcgactcccctactgttgcttacagtgtgctcgtcgtcgcaaaagtcgagaaggggaaatccaagaagctcaagtcagtgaaggagctcctcggcatcaccatcatggagaggtcctccttcgagaagaaccccatcgacttcctcgaggccaagggatataaggaggtcaagaaggacctcatcattaaactccccaagtactccctcttcgagctcgaaaacggacgcaagaggatgctcgcttcagctggtgaactccagaagggcaacgaactcgctttgccctctaaatacgtcaacttcctctacctcgcctcccactatgaaaagctcaagggctccccagaggacaacgagcagaagcaactcttcgtcgagcagcacaagcattacctcgacgagatcatcgagcagatctccgagttctccaagagagtcatcctcgctgacgcaaacctcgacaaggtcctcagtgcatataacaagcaccgcgacaaaccaataagggagcaggccgaaaatattatacacctgttcaccctcaccaacttgggagcaccagccgccttcaagtatttcgacaccaccatcgacagaaagcgctacacctccacaaaggaggtcctggacgccacacttatccaccagtccatcaccggcctctatgaaacacgcatcgacctctctcaattgggaggggacaagagaccaagagacagacacgatggagagcttggaggtagaaagagagcaaggtagttcgaactggccaggtaccgttaacctagacttgtccatcttctggattggccaacttaattaatgtatgaaataaaaggatgcacacatagtgacatgctaatcactataatgtgggcatcaaagttgtgtgttatgtgtaattactagttatctgaataaaagagaaagagatcatccatatttcttatcctaaatgaatgtcacgtgtctttataattctttgatgaaccagatgcatttcattaaccaaatccatatacatataaatattaatcatatataattaatatcaattgggttagcaaaacaaatctagtctaggtgtgttttgcaagcttggcgcgccgttaacttaacggcaaacgctaattagtcactaggcccaggaaacactaactaagccctagcttatcctagcgcaacctagttaggtcttggtaacccgaaatctagtctaggtgtgttttgcgatccgatatcgatgcggccgcatcaggatattcttgtttaagatgttgaactctatggaggtttgtatgaactgatgatctaggaccggataagttcccttcttcatagcgaacttattcaaagaatgttttgtgtatcattcttgttacattgttattaatgaaaaaatattattggtcattggactgaacacgagtgttaaatatggaccaggccccaaataagatccattgatatatgaattaaataacaagaataaatcgagtcaccaaaccacttgccttttttaacgagacttgttcaccaacttgatacaaaagtcattatcctatgcaaatcaataatcatacaaaaatatccaataacactaaaaaattaaaagaaatggataatttcacaatatgttatacgataaagaagttacttttccaagaaattcactgattttataagcccacttgcattagataaatggcaaaaaaaaacaaaaaggaaaagaaataaagcacgaagaattctagaaaatacgaaatacgcttcaatgcagtgggacccacggttcaattattgccaattttcagctccaccgtatatttaaaaaataaaacgataatgctaaaaaaatataaatcgtaacgatcgttaaatctcaacggctggatcttatgacgaccgttagaaattgtggttgtcgacgagtcagtaataaacggcgtcaaagtggttgcagccggcacacacgagtcgtgtttatcaactcaaagcacaaatacttttcctcaacctaaaaataaggcaattagccaaaaacaactttgcgtgtaaacaacgctcaatacacgtgtcattttattattagctattgcttcaccgccttagctttctcgtgacctagtcgtcctcgtcttttcttcttcttcttctataaaacaatacccaaagagctcttcttcttcacaattcagatttcaatttctcaaaatcttaaaaactttctctcaattctctctaccgtgatcaaggtaaatttctgtgttccttattctctcaaaatcttcgattttgttttcgttcgatcccaatttcgtatatgttctttggtttagattctgttaatcttagatcgaagacgattttctgggtttgatcgttagatatcatcttaattctcgattagggtttcatagatatcatccgatttgttcaaataatttgagttttgtcgaataattactcttcgatttgtgatttctatctagatctggtgttagtttctagtttgtgcgatcgaatttgtcgattaatctgagtttttctgattaacagccatggctgcaactactcttacatctgctttacctggtgctttcagttcatcccagagaccaagtgctcctttcaacttacaaagatcacctagagtgcttagaaggttcaacagaaagacaggacgtcaacctcgtggacttgttcgtgctgcaaaggctcaagcggcgcaaaacctgccagagaaattcgatgaaacaagactctgggaggccctcaggggatttggggttagtccaagtagggttacttacgctcccgtcggattcggagattaccactggaccgtcacagatgaagacgggagaccttggttcgcaactgtcagtgacctcgaacacaaagagcattgcgggcagggagcacaagcagcccttaaaggactcagacaagctatggacactgccctcgcacttagagatagggacggactcagattcgtggttgctccagtggcagcaacagatgggggtggccctgtccttccccttgacgctaggtatgcactcacagtcttccctcacgtcccaggaagaacaggagagttcggacaaagactcacagaggcagagagggacagactgcttgctcttctggcagaactccacggaagaacacctcctgaaacaaccccaccagccgatatggaaccaccaggacttcctggtgttagagcagcactcgccgaaagtgaaggaccttggagtggaggaccatttgcagaacccgctagacttcttctcagagaacacgaggccacactgcacgcaagactcgctgaattcgaagccctcgtcgcaagagttaagggtcgtggagcacctcttgtcgttacccacggagaaccacacccaggcaacttgatcctcggagaggaaggctatctcctcgtggactgggatacagttggactggctccagctgaaagggatttgagtctcatctcagacgacccagctgacctcgcaagatacgcagagcttacaggaagaactccagacccagacgcactcgcactctatagactgcgttggagtctccttgatgtggctgagttcgtcgagtggttcagggctgaacaccaaagaacccaagacaccgagagtgcatggaaggggttcactgacacacttgggcaattggctgctggtggatcagctgcatagcctaggaaacttatctctgttatgaatcagaagaagttcatgtctcgtttcatttaaaactttggtggtttgtgttttggggccttgtaaagcccctgatgaataattgttcaactatgtttccgttcctgtgttatacctttctttctaatgagtaatgacatcaaacttcttctgtattgaaattatgtccttgtgagtctctttatcatcgtttcgtctttacattatatgtgctacttttgtctaatgagcctgaaaagtggctccaatggtacgcactggaagatttgttggcttctggtagatatagcgacagtgttgagcttgtaatatcatgtctcttattgctaaattagttcctttcttaacagaaaccttcaaagtttttgtttttgttttcatttacctaatgtacacatacgctggccatgactaacaacatgtccaggcttagagcatatttttttctagcttaaattgttaacttgtcattcagtaaaatccgagaattgtgaagctctaattgaagctaattcgttttataaagtcagttaaaaagtatactaaattatccaacttttcttcaaaatctcaaaattctatgacaaaacgatagtctttgtttatgtcagtaccacaaagaggtggaaaaaaacaccaaaaaaacaataagcaaactatacactgagaagaaaaataaaagagagctcaatagatgttttatactaacggtagattagatcaaagatccaagctttactctacatagagcagaacccagaatcccttcatatctcttttattctagcaccgataatctactgaaaagaagacacttagagctctgtctctttgtcaaagaagtcccagccgtcatccagaagctccttacgttcattaacagaggtaccggcggccgcgggcaactttattatacaaagttgatagatatcggtccgacggccagaatggccatctggattcagcaggcctagaaggccatttagtcctagcgatcgcgctgacaagcggtatttaaatcatcattctaggcgcgccacttacgcttgattccgatgacttcgtaggttcctagctcaagccgctcgtgtccaagcgtcacttacgattagctaatgattacggcatctaggaccgactagttcttatgtgcttctagtctccaaatgtggttgatagttattttgctctaagatcaacagtaatgaagtataaatcatcgttgtggtgtgctactcggttaattgagcattaacacacacaaacatgacgaggatggtataatctccaaaaatgtgtactttgttaggtgggaccctatagccttgattaatgtgctatgttaggcatgcctggaaacgtgtgacgcatatgttttgtgaacctgttgatattatatgtgcttttatattaccatattttattaaaatactaatatttattactagtaagatataacattctatctagcttaaaaactaaccataaatattccataataactagatttaccaaactaatatactaaatatacataataaatacaaaattaacaagacaataatcaatatttatgagcttaatatatttagacattatggttggtcgacgataatcatgctaacttttcgtaattgcttgattgaaatatgcttagaataatgcctctttgttctacatggcaaatagggaccattatggtgtaacaccctgggaaccacaaacaccccgaaatgctactaaactacacaactaaccttcatatataaaatttcgacagcatctcctttgaaaatttgcatagacgtggaagcaacagagtataaacagatctagctagctaagtttaaacggccggccaaacgtgcaagcgctactagacaattcagtacattaaaaacgtccgcaatgtgttattaagttgtctaagcgtcaatttatttacaattgaatatatcctgccaccagccagccaacagctccccgaccggcagctcggcacaaaatcaccactcgatacaggcagcccatcagtccgggacggcgtcagcgggagagccgttgtaaggcggcagactttgctcatgttaccgatgctattcggaagaacggcaactaagctgccgggtttgaaacacggatgatctcgcggagggtagcatgttgattgtaacgatgacagagcgttgctgcctgtgatcaaatatcatctccctcgcagagatccgaattatcagccttcttattcatttctcgcttaaccgtgacaggcgcgcgcggtgccacctgggtccttttcatcacgtgctataaaaataattataatttaaattttttaatataaatatataaattaaaaatagaaagtaaaaaaagaaattaaagaaaaaatagtttttgttttccgaagatgtaaaagactctagggggatcgccaacaaatactaccttttatcttgctcttcctgctctcaggtattaatgccgaattgtttcatcttgtctgtgtagaagaccacacacgaaaatcctgtgattttacattttacttatcgttaatcgaatgtatatctatttaatctgcttttcttgtctaataaatatatatgtaaagtacgctttttgttgaaattttttaaacctttgtttattttttttttcttcattccgtaactcttctaccttctttatttactttctaaaatccaaatacaaaacataaaaataaataaacacagagtaaattcccaaattattccatcattaaaagatacgaggcgcgtgtaagttacaggcaagcgatccgtcctaagaaaccattattatcatgacattaacctataaaaataggcgtatcacgaggccctttcgtctcgcgcgtttcggtgatgacggtgaaaacctctgacacatgcagctcccggagacggtcacagcttgtctgtaagcggatgccgggagcagacaagcccgtcagggcgcgtcagcgggtgttggcgggtgtcggggctggcttaactatgcggcatcagagcagattgtactgagagtgcaccataccacagcttttcaattcaattcatcattttttttttattcttttttttgatttcggtttctttgaaatttttttgattcggtaatctccgaacagaaggaagaacgaaggaaggagcacagacttagattggtatatatacgcatatgtagtgttgaagaaacatgaaattgcccagtattcttaacccaactgcacagaacaaaaacctgcaggaaacgaagataaatcatgtcgaaagctacatataaggaacgtgctgctactcatcctagtcctgttgctgccaagctatttaatatcatgcacgaaaagcaaacaaacttgtgtgcttcattggatgttcgtaccaccaaggaattactggagttagttgaagcattaggtcccaaaatttgtttactaaaaacacatgtggatatcttgactgatttttccatggagggcacagttaagccgctaaaggcattatccgccaagtacaattttttactcttcgaagacagaaaatttgctgacattggtaatacagtcaaattgcagtactctgcgggtgtatacagaatagcagaatgggcagacattacgaatgcacacggtgtggtgggcccaggtattgttagcggtttgaagcaggcggcagaagaagtaacaaaggaacctagaggccttttgatgttagcagaattgtcatgcaagggctccctatctactggagaatatactaagggtactgttgacattgcgaagagcgacaaagattttgttatcggctttattgctcaaagagacatgggtggaagagatgaaggttacgattggttgattatgacacccggtgtgggtttagatgacaagggagacgcattgggtcaacagtatagaaccgtggatgatgtggtctctacaggatctgacattattattgttggaagaggactatttgcaaagggaagggatgctaaggtagagggtgaacgttacagaaaagcaggctgggaagcatatttgagaagatgcggccagcaaaactaaaaaactgtattataagtaaacgcgcgcgggcgcgccttttcagcctgatacagattaaatcagaacgcagaagcggtctgataaaacagaatttgcctggcggcagtagcgcggtggtcccacctgaccccatgccgaactcagaagtgaaacgccgtagcgccgatggtagtgtggggtctccccatgcgagagtagggaactgccaggcatcaaataaaacgaaaggctcagtcgaaagactgggcctttcgttttatctgttgtttgtcggtgaacgctctcctgagtaggacaaatccgccgggagcggatttgaacgttgcgaagcaacggcccggagggtggcgggcaggacgcccgccataaactgccaggcatcaaattaagcagaaggccatcctgacggatggcctttttgcgtttctacaaactcttaccgcacccggagcgggcgcgaggccgccaaggcccgaggcgtgaagtttggcccccgccctaccctcaccccggcacagatcgcgcacgcccgcgagctgatcgaccaggaaggccgcaccgtgaaagaggcggctgcactgcttggcgtgcatcgctcgaccctgtaccgcgcacttgagcgcagcgaggaagtgacgcccaccgaggccaggcggcgcggtgccttccgtgaggacgcattgaccgaggccgacgccctggcggccgccgagaatgaacgccaagaggaacaagcatgaaaccgcaccaggacggccaggacgaaccgtttttcattaccgaagagatcgaggcggagatgatcgcggccgggtacgtgttcgagccgcccgcgcacgtctcaaccgtgcggctgcatgaaatcctggccggtttgtctgatgccaagctggcggcctggccggccagcttggccgctgaagaaaccgagcgccgccgtctaaaaaggtgatgtgtatttgagtaaaacagcttgcgtcatgcggtcgctgcgtatatgatgcgatgagtaaataaacaaatacgcaaggggaacgcatgaaggttatcgctgtacttaaccagaaaggcgggtcaggcaagacgaccatcgcaacccatctagcccgcgccctgcaactcgccggggccgatgttctgttagtcgattccgatccccagggcagtgcccgcgattgggcggccgtgcgggaagatcaaccgctaaccgttgtcggcatcgaccgcccgacgattgaccgcgacgtgaaggccatcggccggcgcgacttcgtagtgatcgacggagcgccccaggcggcggacttggctgtgtccgcgatcaaggcagccgacttcgtgctgattccggtgcagccaagcccttacgacatatgggccaccgccgacctggtggagctggttaagcagcgcattgaggtcacggatggaaggctacaagcggcctttgtcgtgtcgcgggcgatcaaaggcacgcgcatcggcggtgaggttgccgaggcgctggccgggtacgagctgcccattcttgagtcccgtatcacgcagcgcgtgagctacccaggcactgccgccgccggcacaaccgttcttgaatcagaacccgagggcgacgctgcccgcgaggtccaggcgctggccgctgaaattaaatcaaaactcatttgagttaatgaggtaaagagaaaatgagcaaaagcacaaacacgctaagtgccggccgtccgagcgcacgcagcagcaaggctgcaacgttggccagcctcgcagacacgccagccatgaagcgggtcaactttcagttgccggcggaggatcacaccaagctgaagatgtacgcggtacgccaaggcaagaccattaccgagctgctatctgaatacatcgcgcagctaccagagtaaatgagcaaatgaataaatgagtagatgaattttagcggctaaaggaggcggcatggaaaatcaagaacaaccaggcaccgacgccgtggaatgccccatgtgtggaggaacgggcggttggccaggcgtaagcggctgggttgcctgccggccctgcaatggcactggaacccccaagcccgaggaatcggcgtgagcggtcgcaaaccatccggcccggtacaaatcggcgcggcgctgggtgatgacctggtggagaagttgaaggcagcgcaggccgcccagcggcaacgcatcgaggcagaagcacgccccggtgaatcgtggcaagcagccgctgatcgaatccgcaaagaatcccggcaaccgccggcagccggtgcgccgtcgattaggaagccgcccaagggcgacgagcaaccagattttttcgttccgatgctctatgacgtgggcacccgcgatagtcgcagcatcatggacgtggccgttttccgtctgtcgaagcgtgaccgacgagctggcgaggtgatccgctacgagcttccagacgggcacgtagaggtttccgcagggccggcaggcatggccagtgtgtgggattacgacctggtactgatggcggtttcccatctaaccgaatccatgaaccgataccgggaagggaagggagacaagcccggccgcgtgttccgtccacacgttgcggacgtactcaagttctgccggcgagccgatggcggaaagcagaaagacgacctggtagaaacctgcattcggttaaacaccacgcacgttgccatgcagcgtacgaagaaggccaagaacggccgcctggtgacggtatccgagggtgaagccttgattagccgctacaagatcgtaaagagcgaaaccgggcggccggagtacatcgagatcgagctagctgattggatgtaccgcgagatcacagaaggcaagaacccggacgtgctgacggttcaccccgattactttttgatcgatcccggcatcggccgttttctctaccgcctggcacgccgcgccgcaggcaaggcagaagccagatggttgttcaagacgatctacgaacgcagtggcagcgccggagagttcaagaagttctgtttcaccgtgcgcaagctgatcgggtcaaatgacctgccggagtacgatttgaaggaggaggcggggcaggctggcccgatcctagtcatgcgctaccgcaacctgatcgagggcgaagcatccgccggttcctaatgtacggagcagatgctagggcaaattgccctagcaggggaaaaaggtcgaaaaggtctctttcctgtggatagcacgtacattgggaacccaaagccgtacattgggaaccggaacccgtacattgggaacccaaagccgtacattgggaaccggtcacacatgtaagtgactgatataaaagagaaaaaaggcgatttttccgcctaaaactctttaaaacttattaaaactcttaaaacccgcctggcctgtgcataactgtctggccagcgcacagccgaagagctgcaaaaagcgcctacccttcggtcgctgcgctccctacgccccgccgcttcgcgtcggcctatggcgcgccggaaaatatgcatggcatgcccgttccatacagaagctgggcgaacaaacgatgctcgccttccagaaaaccgaggatgcgaaccacttcatccggggtcagcaccaccggcaagcgccgcgacggccgaggtcttccgatctcctgaagccagggcagatccgtgcacagcaccttgccgtagaagaacagcaaggccgccaatgcctgacgatgcgtggagaccgaaaccttgcgctcgttcgccagccaggacagaaatgcctcgacttcgctgctgcccaaggttgccgggtgacgcacaccgtggaaacggatgaaggcacgaacccagtggacataagcctgttcggttcgtaagctgtaatgcaagtagcgtatgcgctcacgcaactggtccagaaccttgaccgaacgcagcggtggtaacggcgcagtggcggttttcatggcttgttatgactgtttttttggggtacagtctatgcctcgggcatccaagcagcaagcgcgttacgccgtgggtcgatgtttgatgttatggagcagcaacgatgttacgcagcagggcagtcgccctaaaacaaagttaaacatcatgagggaagcggtgatcgccgaagtatcgactcaactatcagaggtagttggcgtcatcgagcgccatctcgaaccgacgttgctggccgtacatttgtacggctccgcagtggatggcggcctgaagccacacagtgatattgatttgctggttacggtgacggtaaggcttgatgaaacaacgcggcgagctttgatcaacgaccttttggaaacttcggcttcccctggagagagcgagattctccgcgctgtagaagtcaccattgttgtgcacgacgacatcattccgtggcgttatccagctaagcgcgaactgcaatttggggaatggcagcgcaatgacattcttgcaggtatcttcgagccagccacgatcgacattgatctggctatcttgctgacaaaagcaagagaacatagcgttgccttggtaggtccagcggcggaggaactctttgatccggttcctgaacaggatctatttgaggcgctaaatgaaaccttaacgctatggaactcgccgcccgactgggctggcgatgagcgaaatgtagtgcttacgttgtcccgcatttggtacagcgcagtaaccggcaaaatcgcgccgaaggatgtcgctgccgactgggcaatggagcgcctgccggcccagtatcagcccgtcatacttgaagctagacaggcttatcttggacaagaagaagatcgcttggcctcgcgcgcagatcagttggaagaatttgtccactacgtgaaaggcgagatcaccaaggtagtcggcaaataatgtctaacaattcgttcaagccgacgccgcttcgcggcgcggcttaactcaagcgttagatgcactatacgtaaccaactagtaggaacagtgaattggagttcgtcttgttataattagcttcttgggggatctttaaatactgtagaaaagaggaaggaaataataaatggctaaaatgagaatatcaccggaattgaaaaaactgatcgaaaaataccgctgcgtaaaagatacggaaggaatgtctcctgctaaggtatataagctggtgggagaaaatgaaaacctatatttaaaaatgacggacagccggtataaagggaccacctatgatgtggaacgggaaaaggacatgatgctatggctggaaggaaagctgcctgttccaaaggtcctgcactttgaacggcatgatggctggagcaatctgctcatgagtgaggccgatggcgtcctttgctcggaagagtatgaagatgaacaaagccctgaaaagattatcgagctgtatgcggagtgcatcaggctctttcactccatcgacatatcggattgtccctatacgaatagcttagacagccgcttagccgaattggattacttactgaataacgatctggccgatgtggattgcgaaaactgggaagaagacactccatttaaagatccgcgcgagctgtatgattttttaaagacggaaaagcccgaagaggaacttgtcttttcccacggcgacctgggagacagcaacatctttgtgaaagatggcaaagtaagtggctttattgatcttgggagaagcggcagggcggacaagtggtatgacattgccttctgcgtccggtcgatcagggaggatatcggggaagaacagtatgtcgagctattttttgacttactggggatcaagcctgattgggagaaaataaaatattatattttactggatgaattgttttagtacctagatacttcgctcgtgaaaagcagcgctcagggggctagtgcgctcttccgcttcctcgctcactgactcgctgcgctcggtcgttcggctgcggcgagcggtatcagctcactcaaaggcggtaatacggttatccacagaatcaggggataacgcaggaaagaacatgtgagcaaaaggccagcaaaaggccaggaaccgtaaaaaggccgcgttgctggcgtttttccataggctccgcccccctgacgagcatcacaaaaatcgacgctcaagtcagaggtggcgaaacccgacaggactataaagataccaggcgtttccccctggaagctccctcgtgcgctctcctgttccgaccctgccgcttaccggatacctgtccgcctttctcccttcgggaagcgtggcgctttctcatagctcacgctgtaggtatctcagttcggtgtaggtcgttcgctccaagctgggctgtgtgcacgaaccccccgttcagcccgaccgctgcgccttatccggtaactatcgtcttgagtccaacccggtaagacacgacttatcgccactggcagcagccactggtaacaggattagcagagcgaggtatgtaggcggtgctacagagttcttgaagtggtggcctaactacggctacactagaagaacagtatttggtatctgcgctctgctgaagccagttaccttcggaaaaagagttggtagctcttgatccggcaaacaaaccaccgctggtagcggtggtttttttgtttgcaagcagcagattacgcgcagaaaaaaaggatctcaagaagatcctttgatcttttctacggggtctgacgctcagtggaacgaaaactcacgttaagggattttggtcatgagattatcaaaaaggatcttcacctagatccttttaaattaaaaatgaagcgtacgttggaatcgcttctacaaaa

SEQ ID NO: 100 - DNA, 27655 bp, Artificial Sequence
  Nucleotide sequence of Vector 12
tcggctgcggcgagcggtatcagctcactcaaaggcggtaatacggttatccacagaatcaggggataacgcaggaaagaacatgtgagcaaaaggccagcaaaaggccaggaaccgtaaaaaggccgcgttgctggcgtttttccataggctccgcccccctgacgagcatcacaaaaatcgacgctcaagtcagaggtggcgaaacccgacaggactataaagataccaggcgtttccccctggaagctccctcgtgcgctctcctgttccgaccctgccgcttaccggatacctgtccgcctttctcccttcgggaagcgtggcgctttctcatagctcacgctgtaggtatctcagttcggtgtaggtcgttcgctccaagctgggctgtgtgcacgaaccccccgttcagcccgaccgctgcgccttatccggtaactatcgtcttgagtccaacccggtaagacacgacttatcgccactggcagcagccactggtaacaggattagcagagcgaggtatgtaggcggtgctacagagttcttgaagtggtggcctaactacggctacactagaagaacagtatttggtatctgcgctctgctgaagccagttaccttcggaaaaagagttggtagctcttgatccggcaaacaaaccaccgctggtagcggtggtttttttgtttgcaagcagcagattacgcgcagaaaaaaaggatctcaagaagatcctttgatcttttctacggggtctgacgctcagtggaacgaaaactcacgttaagggattttggtcatgagattatcaaaaaggatcttcacctagatccttttaaattaaaaatgaagcgtacgttggaatcgcttctacaaaactcacagaaacaatcaaacaaacatacacagcgatttattcacacgaacccgaattacaacggtatatatcctgtcagccaacaccaaaacatcaaaaaaatcgggatcaggatcaggatctgcggccgcatcctgcaggagctcaaacgagcaggaagcaacgagagggtggcgcgcgaccgacgtgcgtacgtagcatgagcctgagtggagacgttggacgtgtatgtatatacctctctgcgtgttaactatgtacgtaagcggcaggcagtgcaataagtgtggctctgtagtatgtacgtgcgggtacgatgctgtaagctactgaggcaagtccataaataaataatgacacgtgcgtgttctataatctcttcgcttcttcatttgtccccttgcggagtttggcatccattgatgccgttacgctgagaacagacacagcagacgaaccaaaagtgagttcttgtatgaaactatgacccttcatcgctaggctcaaacagcaccccgtacgaacacagcaaattagtcatctaactattagcccctacatgtttcagacgatacataaatatagcccatccttagcaattagctattggccctgcccatcccaagcaatgatctcgaagtatttttaatatatagtatttttaatatgtagcttttaaaattagaagataattttgagacaaaaatctccaagtatttttttgggtattttttactgcctccgtttttctttatttctcgtcacctagtttaattttgtgctaatcggctataaacgaaacagagagaaaagttactctaaaagcaactccaacagattagatataaatcttatatcctgcctagagctgttaaaaagatagacaactttagtggattagtgtatgcaacaaactctccaaatttaagtatcccaactacccaacgcatatcgttcccttttcattggcgcacgaactttcacctgctatagccgacgtacatgttcgttttttttgggcggcgcttactttcttccccgttcgttctcagcatcgcaactcaatttgttatggcggagaagcccttgtatcccaggtagtaatgcacagatatgcattattattattcataaaacgaacgctcttcaactggaagagcggttactaccggttcactagctagctgctaatcgagctagttaccctatgaggtgacatgaagcgctcacggttactatgacggttagcttcacgactgttggtggcagtagcgtacgacttagctatagttccggacttacctagctaggttaccagagctggtcaccttcttcatcgctaagaagacactcagtagtccggaccgatatcgctatcaactttgtatagaaaagttgggccgaattcgagctcggtacggccagaatggcccggaccgaagcttgcatgcggatccccgggtgtgatttagtataaagtgaagtaatggtcaaaagaaaaagtgtaaaacgaagtacctagtaataagtaatattgaacaaaataaatggtaaagtgtcagatatataaaataggctttaataaaaggaagaaaaaaaacaaacaaaaaataggttgcaatggggcagagcagagtcatcatgaagctagaaaggctaccgatagataaactatagttaattaaatacattaaaaaatacttggatctttctcttaccctgtttatattgagacctgaaacttgagagagatacactaatcttgccttgttgtttcattccctaacttacaggactcagcgcatgtcatgtggtctcgttccccatttaagtcccacaccgtctaaacttattaaattattaatgtttataactagatgcacaacaacaaagcttggtgctaagcacgacatccagttttagagctagaaatagcaagttaaaataaggctagtccgttatcaacttgaaaaagtggcaccgagtcggtgctttttttactagtcctgcaggggcgcgccggtcacccggtccgggcctagaaggccacccagctttcttgtacaaagtggggatcggccagaatggcccggaccgggttaccagtctaaaaacggcccctaactaacgcttagttgcccgctagattagtcccccgttagtgcctagttagacacacgacgaactaggggctactagtagcggccgcaattggatcgggtttacttattttgtgggtatctatacttttattagatttttaatcaggctcctgatttctttttatttcgattgaattcctgaacttgtattattcagtagatcgaataaattataaaaagataaaatcataaaataatattttatcctatcaatcatattaaagcaatgaatatgtaaaattaatcttatctttattttaaaaaatcatataggtttagtatttttttaaaaataaagataggattagttttactattcactgcttattacttttaaaaaaatcataaaggtttagtatttttttaaaataaatataggaatagttttactattcactgctttaatagaaaaatagtttaaaatttaagatagttttaatcccagcatttgccacgtttgaacgtgagccgaaacgatgtcgttacattatcttaacctagctgaaacgatgtcgtcataatatcgccaaatgccaactggactacgtcgaacccacaaatcccacaaagcgcgtgaaatcaaatcgctcaaaccacaaaaaagaacaacgcgtttgttacacgctcaatcccacgcgagtagagcacagtaaccttcaaataagcgaatggggcataatcagaaatccgaaataaacctaggggcattatcggaaatgaaaagtagctcactcaatataaaaatctaggaaccctagttttcgttatcactctgtgctccctcgctctatttctcagtctctgtgtttgcggctgaggattccgaacgagtgaccttcttcgtttctcgcaaaggtaacagcctctgctcttgtctcttcgattcgatctatgcctgtctcttatttacgatgatgtttcttcggttatgtttttttatttatgctttatgctgttgatgttcggttgtttgtttcgctttgtttttgtggttcagttttttaggattcttttggtttttgaatcgattaatcggaagagattttcgagttatttggtgtgttggaggtgaatcttttttttgaggtcatagatctgttgtatttgtgttataaacatgcgactttgtatgattttttacgaggttatgatgttctggttgttttattatgaatctgttgagacagaaccatgatttttgttgatgttcgtttacactattaaaggtttgttttaacaggattaaaagttttttaagcatgttgaaggagtcttgtagatatgtaaccgtcgatagtttttttgtgggtttgttcacatgttatcaagcttaatcttttactatgtatgcgaccatatctggatccagcaaaggcgattttttaattccttgtgaaacttttgtaatatgaagttgaaattttgttattggtaaactataaatgtgtgaagttggagtatacctttaccttcttatttggctttgtgatagtttaatttatatgtattttgagttctgacttgtatttctttgaattgattctagtttaagtaatccatggcacctaaaaagaagaggaaagttatggacaaaaagtactccatagggctcgatatcggcacaaacagtgtggggtgggcagtcatcactgacgactacaaggtcccctccaagaagttcaaggtcctcggcaatacagaccgccactccatcaagaagaacctcatcggagcactgttgttcgactccggagaaactgccgaagcaaccagactcaagaggaccgccagaagaaggtacacaaggcgcaagaacaggatctgctacctccaggagatcttcagtaacgagatggcaaaggtcgacgactctttcttccacaggctcgaggaatccttcctcgtcgaggaggacaagaagcatgagagacaccccatcttcggaaacatcgtcgacgaggtaagtttctgcttctacctttgatatatatataataattatcattaattagtagtaatataatatttcaaatatttttttcaaaataaaagaatgtagtatatagcaattgcttttctgtagtttataagtgtgtatattttaatttataacttttctaatatatgaccaaaacatggtgatgtgcaggtcgcctaccacgagaagtacccaaccatctaccacctgaggaagaagctcgtcgacagtaccgacaaggctgacctcaggctcatctacctcgcactcgcccacatgattaagttcaggggccacttcctcatagagggagacctcaacccagacaactccgacgtcgacaaactcttcatccaactcgtgcagacctacaatcaactctttgaagagaacccaatcaacgcctccggagtggatgctaaggctatattgtccgccaggctctccaaatcaagacgcctcgaaaacctcatcgcccagctcccaggggagaagaaaaatagcctcttcgggaacctcatagccctgtcccttggactcacccctaacttcaaatcaaatttcgacctcgcagaggacgctaagcttcaactctccaaggacacctacgacgacgacctcgataacctcctcgcccaaatcggtgatcaatacgctgacctcttcctcgctgctaagaacctctccgacgccatactcctctccgacattctgagggtcaacaccgagatcacaaaggctcccttgtccgcctccatgattaaacgctacgacgaacaccaccaggacctcaccctcttgaaggcactggttagacagcagctccccgagaagtacaaggaaatcttcttcgaccaatcaaaaaacggctacgccggatacatcgacggaggagcatcccaggaagagttctacaagttcatcaaaccaattctcgaaaagatggacggaacagaggagctcttggtcaagctcaacagggaggacctcctcagaaagcagagaaccttcgacaacggcagtatcccccaccagatccaccttggagagttgcacgcaatcctcaggaggcaagaggacttctaccccttcctcaaggacaacagggagaagatcgagaagatccttacattccgcatcccctactacgtcggacctttggcaagaggaaactcccgcttcgcatggatgactcgcaagagtgaggaaaccatcaccccttggaacttcgaggaggtcgtcgataagggagcttcagcccagtccttcatcgagcgcatgaccaacttcgataaaaatctccccaatgaaaaagtcctccccaagcacagtctgctctacgagtacttcacagtctacaacgagctcaccaaggtcaagtacgtcaccgaaggcatgagaaaacccgccttcctcagtggcgagcagaagaaggcaatcgtggacttgctgttcaagaccaaccgcaaggtcacagtcaagcaattaaaagaggactacttcaagaaaatagagtgcttcgacagtgtcgagatctctggggtcgaggacaggttcaacgcatccttggggacctatcacgacctcctcaagatcattaaagacaaggacttcctcgacaacgaggagaacgaggacatactggaggacatcgtcctcaccctcactctctttgaggacagggagatgatagaggagcgcctcaaaacctacgcccacctcttcgacgacaaggtgatgaaacagctcaagaggcgcagatacaccggatggggtagactctccaggaagctgattaatggcatccgcgacaaacagtccggcaagaccatcctcgacttcctcaagagtgacggattcgccaaccgcaacttcatgcagctcatacacgacgactccctcaccttcaaggaggacatccaaaaagcccaagtctccggacagggagactcattgcacgaacacatcgccaacttggctggatctcctgctattaaaaagggcatcctccaaaccgtcaaggtggtcgacgaactcgtcaaggtcatgggtagacacaagcccgaaaatatcgtcatcgagatggcaagggagaaccagacaacccagaagggccaaaaaaactccagggagcgcatgaaacgcatcgaggagggaataaaggagctcgggtcccagatcctcaaggagcaccccgtcgaaaatactcaactccagaatgaaaagctctacctctactacctccaaaacggcagggatatgtacgtcgaccaagagctcgacattaatcgcctctccgactacgacgtcgatcacatcgtcccccagagtttcctcaaggacgactccatcgacaacaaggtcctcaccagatccgataaaaatcgcggaaagtccgacaacgtcccctctgaggaagtggttaagaagatgaaaaactactggagacagctcctcaacgcaaagctgatcacccagcgcaagttcgacaacctcacaaaggctgagagagggggactctctgagttggacaaggccggcttcatcaagagacaactcgtggaaacccgccagatcaccaagcatgtcgcacagattctcgactcccgcatgaatactaaatacgatgaaaatgacaagctcatcagggaggtcaaggtcatcaccctgaagtccaagctcgtctccgacttccgcaaggacttccagttctacaaggtccgcgagatcaacaactaccaccacgcccacgacgcatacctcaacgctgtggttggaacagcactcatcaagaagtaccccaagctcgagtccgagttcgtctacggcgactacaaggtctacgacgtcaggaagatgatcgccaagtccgagcaagagatcggaaaggccaccgcaaaatatttcttctactccaacataatgaacttcttcaaaaccgagatcaccctggctaacggagaaataaggaagaggcccctgatagaaaccaacggcgagacaggcgagattgtctgggacaaaggcagggacttcgcaaccgtcagaaaggtgctcagtatgcctcaggtcaacatagtcaaaaagaccgaagtccagactggaggattctccaaggagtccatcctccccaaaaggaactccgacaaactgatcgccaggaaaaaggactgggaccccaaaaaatatggcggcttcgactcccctactgttgcttacagtgtgctcgtcgtcgcaaaagtcgagaaggggaaatccaagaagctcaagtcagtgaaggagctcctcggcatcaccatcatggagaggtcctccttcgagaagaaccccatcgacttcctcgaggccaagggatataaggaggtcaagaaggacctcatcattaaactccccaagtactccctcttcgagctcgaaaacggacgcaagaggatgctcgcttcagctggtgaactccagaagggcaacgaactcgctttgccctctaaatacgtcaacttcctctacctcgcctcccactatgaaaagctcaagggctccccagaggacaacgagcagaagcaactcttcgtcgagcagcacaagcattacctcgacgagatcatcgagcagatctccgagttctccaagagagtcatcctcgctgacgcaaacctcgacaaggtcctcagtgcatataacaagcaccgcgacaaaccaataagggagcaggccgaaaatattatacacctgttcaccctcaccaacttgggagcaccagccgccttcaagtatttcgacaccaccatcgacagaaagcgctacacctccacaaaggaggtcctggacgccacacttatccaccagtccatcaccggcctctatgaaacacgcatcgacctctctcaattgggaggggacaagagaccaagagacagacacgatggagagcttggaggtagaaagagagcaaggtagttcgaactggccaggtaccgttaacctagacttgtccatcttctggattggccaacttaattaatgtatgaaataaaaggatgcacacatagtgacatgctaatcactataatgtgggcatcaaagttgtgtgttatgtgtaattactagttatctgaataaaagagaaagagatcatccatatttcttatcctaaatgaatgtcacgtgtctttataattctttgatgaaccagatgcatttcattaaccaaatccatatacatataaatattaatcatatataattaatatcaattgggttagcaaaacaaatctagtctaggtgtgttttgcaagcttggcgcgccgttaacttaacggcaaacgctaattagtcactaggcccaggaaacactaactaagccctagcttatcctagcgcaacctagttaggtcttggtaacccggtccgggccattctggccgatcccgggcaactttattatacaaagttgatagatatcggtccgacggccagaatggccatctggattcagcaggcctagaaggccatttagtcctagcgatatcaggatattcttgtttaagatgttgaactctatggaggtttgtatgaactgatgatctaggaccggataagttcccttcttcatagcgaacttattcaaagaatgttttgtgtatcattcttgttacattgttattaatgaaaaaatattattggtcattggactgaacacgagtgttaaatatggaccaggccccaaataagatccattgatatatgaattaaataacaagaataaatcgagtcaccaaaccacttgccttttttaacgagacttgttcaccaacttgatacaaaagtcattatcctatgcaaatcaataatcatacaaaaatatccaataacactaaaaaattaaaagaaatggataatttcacaatatgttatacgataaagaagttacttttccaagaaattcactgattttataagcccacttgcattagataaatggcaaaaaaaaacaaaaaggaaaagaaataaagcacgaagaattctagaaaatacgaaatacgcttcaatgcagtgggacccacggttcaattattgccaattttcagctccaccgtatatttaaaaaataaaacgataatgctaaaaaaatataaatcgtaacgatcgttaaatctcaacggctggatcttatgacgaccgttagaaattgtggttgtcgacgagtcagtaataaacggcgtcaaagtggttgcagccggcacacacgagtcgtgtttatcaactcaaagcacaaatacttttcctcaacctaaaaataaggcaattagccaaaaacaactttgcgtgtaaacaacgctcaatacacgtgtcattttattattagctattgcttcaccgccttagctttctcgtgacctagtcgtcctcgtcttttcttcttcttcttctataaaacaatacccaaagagctcttcttcttcacaattcagatttcaatttctcaaaatcttaaaaactttctctcaattctctctaccgtgatcaaggtaaatttctgtgttccttattctctcaaaatcttcgattttgttttcgttcgatcccaatttcgtatatgttctttggtttagattctgttaatcttagatcgaagacgattttctgggtttgatcgttagatatcatcttaattctcgattagggtttcatagatatcatccgatttgttcaaataatttgagttttgtcgaataattactcttcgatttgtgatttctatctagatctggtgttagtttctagtttgtgcgatcgaatttgtcgattaatctgagtttttctgattaacagccatggctgcaactactcttacatctgctttacctggtgctttcagttcatcccagagaccaagtgctcctttcaacttacaaagatcacctagagtgcttagaaggttcaacagaaagacaggacgtcaacctcgtggacttgttcgtgctgcaaaggctcaagcggcgcaaaacctgccagagaaattcgatgaaacaagactctgggaggccctcaggggatttggggttagtccaagtagggttacttacgctcccgtcggattcggagattaccactggaccgtcacagatgaagacgggagaccttggttcgcaactgtcagtgacctcgaacacaaagagcattgcgggcagggagcacaagcagcccttaaaggactcagacaagctatggacactgccctcgcacttagagatagggacggactcagattcgtggttgctccagtggcagcaacagatgggggtggccctgtccttccccttgacgctaggtatgcactcacagtcttccctcacgtcccaggaagaacaggagagttcggacaaagactcacagaggcagagagggacagactgcttgctcttctggcagaactccacggaagaacacctcctgaaacaaccccaccagccgatatggaaccaccaggacttcctggtgttagagcagcactcgccgaaagtgaaggaccttggagtggaggaccatttgcagaacccgctagacttcttctcagagaacacgaggccacactgcacgcaagactcgctgaattcgaagccctcgtcgcaagagttaagggtcgtggagcacctcttgtcgttacccacggagaaccacacccaggcaacttgatcctcggagaggaaggctatctcctcgtggactgggatacagttggactggctccagctgaaagggatttgagtctcatctcagacgacccagctgacctcgcaagatacgcagagcttacaggaagaactccagacccagacgcactcgcactctatagactgcgttggagtctccttgatgtggctgagttcgtcgagtggttcagggctgaacaccaaagaacccaagacaccgagagtgcatggaaggggttcactgacacacttgggcaattggctgctggtggatcagctgcatagcctaggaaacttatctctgttatgaatcagaagaagttcatgtctcgtttcatttaaaactttggtggtttgtgttttggggccttgtaaagcccctgatgaataattgttcaactatgtttccgttcctgtgttatacctttctttctaatgagtaatgacatcaaacttcttctgtattgaaattatgtccttgtgagtctctttatcatcgtttcgtctttacattatatgtgctacttttgtctaatgagcctgaaaagtggctccaatggtacgcactggaagatttgttggcttctggtagatatagcgacagtgttgagcttgtaatatcatgtctcttattgctaaattagttcctttcttaacagaaaccttcaaagtttttgtttttgttttcatttacctaatgtacacatacgctggccatgactaacaacatgtccaggcttagagcatatttttttctagcttaaattgttaacttgtcattcagtaaaatccgagaattgtgaagctctaattgaagctaattcgttttataaagtcagttaaaaagtatactaaattatccaacttttcttcaaaatctcaaaattctatgacaaaacgatagtctttgtttatgtcagtaccacaaagaggtggaaaaaaacaccaaaaaaacaataagcaaactatacactgagaagaaaaataaaagagagctcaatagatgttttatactaacggtagattagatcaaagatccaagctttactctacatagagcagaacccagaatcccttcatatctcttttattctagcaccgataatctactgaaaagaagacacttagagctctgtctctttgtcaaagaagtcccagccgtcatccagaagctccttacgttcattaacagagaattcgtgaaatggaacgtgtgtgatgggtacaagttgcttgtggtgtatcatgtatgagtataaaatttagctcaaataacttatcattgaacggacttagttatacttttttttttttttatctttctaatacatatatttcgttgttataaaagtagaaatgttcgatttctgtaaaattatcgttgatttttcttccacgtaaaataaaattaaaatatgttatatttttagaacataacaagattcgtgtaaatttaaatttgtgagaatttctaaaaatcaattaaaaatcatcacaaattacagaaaaaccatcataaattatagaataaaaataaatacaaatacaaattatgatggtttttaacctcaaacttaaatcttaaatatatttttaacctttaaagatatgattttttggagggcaaaaatatgacctttcttcaaagtagtccatttgtttgtatttattattaattgtaaatattatttttagcaccaaaatatcttggcataaaattaaaacacacattttttttctaaggtaaacattaaaaaaagaactcattccaaaaaagtaacatgtttcaaaaaatccaaaaacatttaaattttaaaataattctagtaatagtatttatatttaatattaaaactcacaaataaatgagattgcccgttttatataaaattgggatgagtaaatatgtatgatacaattatataaggacaattaagtataattatgtgtgcatgttaaagttgatttaattaaataagatgcgtaaattattataacttttttttaacatttatacttgctaacacaccccatattcacatgataataggaggcatctctaatgagttgatatttttacacgagagtgatgagtaagtttgaattatgcaatcataaatagtaaaatttaacaatcaatatttatttaccttatttgtaagtgaaaaaaaatatttgtatatatattataatttaaagtataaatgaatttaaatgaaatattaggctgtgaaattaatcataagattcacaaataagaatctagatgaattaattaatacccatagtgaaaaatagtggtctcattaagaaaaaaattgaaaactcaagtttatgttgtgcacttttgctatgtaagagagaggaaaggattaaaatgaaatgagcaagctttataaaaaaatataaatttaaaaaaaaaaaaaaaaaaaaagcacgaggtagagtagaatgattgcatgagtggcacatggtgacaaattcgagacagatattttcacacctttccatcacatcaactctcccccgttgatcatcatttaatatctcatccaacggcaaacaaacgtacattttagaacataccagaaaatccctctctctcatcaatccacccaagtgatgaaaacgacgtcgacgtgggagaagatccgcaaacggattagacgcgtcgtcagatttcgacacgtgtacggtggatgtttcggactctctcccctcaaccgctttataaattggggtcgtggcttcgccttgaaactcgttctagtgtatgtgattgttgtgactcgttcttcttcgtcgttatcttcttcttttgttgtttgtgtgtttgttttttctctcacctgtaaggatccgccatggcctcctccgagaacgtcatcaccgagttcatgcgcttcaaggtgcgcatggagggcaccgtgaacggccacgagttcgagatcgagggcgagggcgagggccgcccctacgagggccacaacaccgtgaagctgaaggtgacgaagggcggccccctgcccttcgcctgggacatcctgtccccccagttccagtacggctccaaggtgtacgtgaagcaccccgccgacatccccgactacaagaagctgtccttccccgagggcttcaagtgggagcgcgtgatgaacttcgaggacggcggcgtggcgaccgtgacccaggactcctccctgcaggacggctgcttcatctacaaggtgaagttcatcggcgtgaacttcccctccgacggccccgtgatgcagaagaagaccatgggctgggaggcctccaccgagcgcctgtacccccgcgacggcgtgctgaagggcgagacccacaaggccctgaagctgaaggacggcggccactacctggtggagttcaagtccatctacatggccaagaagcccgtgcagctgcccggctactactacgtggacgccaagctggacatcacctcccacaacgaggactacaccatcgtggagcagtacgagcgcaccgagggccgccaccacctgttcctgtagttttgtgatctgatgataagtggttggttcgtgtctcatgcacttgggaggtgatctatttcacctggtgtagtttgtgtttccgtcagttggaaaaacttatccctatcgatttcgttttcattttctgcttttcttttatgtaccttcgtttgggcttgtaacgggcctttgtatttcaactctcaataataatccaagtgcatgttaaacaatttgtcatctgtttcggctttgatatactactggtgaagatgggccgtactactgcatcacaacgaaaaataataataagatgaaaaacttgaagtggaaaaaaaaaaaacttgaatgttcactactactcattgaccataatgtttaacatacatagctcaatagtatttttgtgaatatggcaacacaaacagtccaaaacaattgtctcttactataccaaaccaagggcgccgcttgtttgccactctttgtgtgcaatagtgtgattaccacatctccacattcaatatattccctgaattatctgacgattttgatggctcactgttttcccaagtcttgaattgtcttctgtgcgccagtcaaatgcatatgtgttgagtttatcttttaaatatcaagcttttgtttttaacttttgtttgtaaccaaaaactcacagtaggagtttgatcacataattttatgtttgcctttgcaatttctagtgagtctttgattaaaagcttgaaaagaaaatgcagccaagcttaccaagtaagttatgtgtattaaccagaggaagagagaatcttgcaaaatttcaacaaacacaaaaagaagtattactacgattggtggagaaagaaaacgattccaaatcttgaactgttgttgtaaaagcatagcagaaagtgggagacaaccgaaatagaaatgactataacttaatttaatgttatcattataatttcttctagcaaatatttagaaagtaaatatcacatcaacctttaatgtaattaagctttctctttttgattcatgtgagatgaaaagaaaaaaaagaagagaaaagtgtagaaaacacatcatttctaagctgaagccacttacgcttgattccgatgacttcgtaggttcctagctcaagccgctcgtgtccaagcgtcacttacgattagctaatgattacggcatctaggaccgactagcggtacgctcgagcggtaagtgactagggtcacgtgaccctagtcacttaaattcggccagaatggccatctggattcagcaggcctagaaggcccggaccgattaaactttaattcggtccgggttacctctagaaagcttgtcgagcggtgctaagcacgacatccatggcgaccccagtgatggcaactaagtggatcaacagcaacttttgctccgatttgcgatataatttgtcaaaacatgcctctaaaatcactctaacatcaaatttcttgaataacaattttatacactcccctcctccaacttgttatgtgcccttctgacccttcttgttttgtttgctagttaaccatgtaggaaaaagtatcactccactcaatagtattttcacttcatctggccataaataattttggcctaattcagcatcacgtatcaggagtcaataagcttgtctgtccgtctgtatttatcatctctcttcgtgctactatcacctccccttttcttatggatttttcctgttaaaaaacaaaaaggaacaggtaacccacttgaattaggacaccaatgtaggtgccaccacccgtttccttctgttgagtgtgcacgcttattggttcaacctcagaattaaattcttcataatcccctgttgagagaaaattataatagacaaatcaaattgtgtggacttgccatttcccaaaacattttcattttgtgcgcgtgtgggtggtggggtgcgttttattagaatgaagactgtaaaaaagaggagtgtaggatgataagaagtagtaaatgtcagttgtcaaaagatgaaaagcaacggaggaagggaccaaaccttgacctatggaaaactgagtgctatggtaattattgtcacaggatttaggatgattaataatagttcggaccacaaataaacagctttaagaagttcaactttcccccacggatagcaaatttggttggaccatctttgatgaaagtccccaatctcataattgccaaccttttttatacgaaactagtattttcataattatcaagaatcttcaactcatcagtgatcgctcatttctgattaagaaaaaaaaagggtgagtaaatgaatccattttgtctgttctccatgggtcgagtaatactagtggtcacctaagtgactagggtcacgtgaccctagtcacttattcccaaacactagtaacggccgccagtgtgctggaattcgcccttcccaagctttgctctagatcaaactcacatccaaacataacatggatatcttccttaccaatcatactaattattttgggttaaatattaatcattatttttaagatattaattaagaaattaaaagattttttaaaaaaatgtataaaattatattattcatgatttttcatacatttgattttgataataaatatattttttttaatttcttaaaaaatgttgcaagacacttattagacatagtcttgttctgtttacaaaagcattcatcatttaatacattaaaaaatatttaatactaacagtagaatcttcttgtgagtggtgtgggagtaggcaacctggcattgaaacgagagaaagagagtcagaaccagaagacaaataaaaagtatgcaacaaacaaatcaaaatcaaagggcaaaggctggggttggctcaattggttgctacattcaattttcaactcagtcaacggttgagattcactctgacttccccaatctaagccgcggatgcaaacggttgaatctaacccacaatccaatctcgttacttaggggcttttccgtcattaactcacccctgccacccggtttccctataaattggaactcaatgctcccctctaaactcgtatcgcttcagagttgagaccaagacacactcgttcatatatctctctgctcttctcttctcttctacctctcaaggtacttttcttctccctctaccaaatcctagattccgtggttcaatttcggatcttgcacttctggtttgctttgccttgctttttcctcaactgggtccatctaggatccatgtgaaactctactctttctttaatatctgcggaatacgcgtttgactttcagatctagtcgaaatcatttcataattgcctttctttcttttagcttatgagaaataaaatcactttttttttatttcaaaataaaccttgggccttgtgctgactgagatggggtttggtgattacagaattttagcgaattttgtaattgtacttgtttgtctgtagttttgttttgttttcttgtttctcatacattccttaggcttcaattttattcgagtataggtcacaataggaattcaaactttgagcaggggaattaatcccttccttcaaatccagtttgtttgtatatatgtttaaaaaatgaaacttttgctttaaattctattataactttttttatggctgaaatttttgcatgtgtctttgctctctgttgtaaatttactgtttaggtactaactctaggcttgttgtgcagtttttgaagtataacaacagaagttcctattccgaagttcctattctctagaaagtataggaacttccactagtccatgaaaaagcctgaactcaccgcgacgtctgtcgagaagtttctgatcgaaaagttcgacagcgtctccgacctgatgcagctctcggagggcgaagaatctcgtgctttcagcttcgatgtaggagggcgtggatatgtcctgcgggtaaatagctgcgccgatggtttctacaaagatcgttatgtttatcggcactttgcatcggccgcgctcccgattccggaagtgcttgacattggggaattcagcgagagcctgacctattgcatctcccgccgtgcacagggtgtcacgttgcaagacctgcctgaaaccgaactgcccgctgttctgcagccggtcgcggaggccatggatgcgatcgctgcggccgatcttagccagacgagcgggttcggcccattcggaccgcaaggaatcggtcaatacactacatggcgtgatttcatatgcgcgattgctgatccccatgtgtatcactggcaaactgtgatggacgacaccgtcagtgcgtccgtcgcgcaggctctcgatgagctgatgctttgggccgaggactgccccgaagtccggcacctcgtgcacgcggatttcggctccaacaatgtcctgacggacaatggccgcataacagcggtcattgactggagcgaggcgatgttcggggattcccaatacgaggtcgccaacatcttcttctggaggccgtggttggcttgtatggagcagcagacgcgctacttcgagcggaggcatccggagcttgcaggatcgccgcggctccgggcgtatatgctccgcattggtcttgaccaactctatcagagcttggttgacggcaatttcgatgatgcagcttgggcgcagggtcgatgcgacgcaatcgtccgatccggagccgggactgtcgggcgtacacaaatcgcccgcagaagcgcggccgtctggaccgatggctgtgtagaagtactcgccgatagtggaaaccgacgccccagcactcgtccgagggcaaaggaatagtgaggtacctaaagaaggagtgcgtcgaagcagatcgttcaaacatttggcaataaagtttcttaagattgaatcctgttgccggtcttgcgatgattatcatataatttctgttgaattacgttaagcatgtaataattaacatgtaatgcatgacgttatttatgagatgggtttttatgattagagtcccgcaattatacatttaatacgcgatagaaaacaaaatatagcgcgcaaactaggataaattatcgcgcgcggtgtcatctatgttactagatcgatgtcgacccgggccctaggaggccggcccagctgatgatcccggtgaagttcctattccgaagttcctattctccagaaagtataggaacttcactagagcttgcggccgctcgagcggtaagtgactagggtcacgtgaccctagtcacttaaattcggccagaatggccatctggattcagcaggcctagaaggcccggaccgattaaactttaattcggtccgggttacctctagaaagcttgtcgacatgtcgtgcttagcacgtgatgcatcatagatgcggtaaattattactttctgtgactgggacaatgtgctcctccagtggccacgtatcggtaaaccttgtgccagaacactaatatttatataatcaacaataaagaatggtaagcattagacaaagacaaaaacaatttttaataatttacctgtactaattagaaggggtttgatttaattttattaaacttaacatgtgcaatatgtccctttgtttagaggaaaacaattacggtatttccttactaacgtaaactctgaatataatcatacatctgtattctgaaaaagaaaaaagaactagagataaaagcgtagaaacaacagtatgtggtcatagtcatacacgtaaagggatgaaaattgaaaatagaacctgcaggaaataagtttgcatttaatttggatatatatcttgaagtgtaaggttaacctctcagctattaaatagtactactactaacactcaaatagtacttctactagcactcacggtaacaatctcttagtagggatgggaataggccagatcggcctacaggggtctacgacttgaggtgctaagcacgacatccatggatcgtaccattcttatgtgcttctagtctccaaatgtggttgatagttattttgctctaagatcaacagtaatgaagtataaatcatcgttgtggtgtgctactcggttaattgagcattaacacacacaaacatgacgaggatggtataatctccaaaaatgtgtactttgttaggtgggaccctatagccttgattaatgtgctatgttaggcatgcctggaaacgtgtgacgcatatgttttgtgaacctgttgatattatatgtgcttttatattaccatattttattaaaatactaatatttattactagtaagatataacattctatctagcttaaaaactaaccataaatattccataataactagatttaccaaactaatatactaaatatacataataaatacaaaattaacaagacaataatcaatatttatgagcttaatatatttagacattatggttggtcgacgataatcatgctaacttttcgtaattgcttgattgaaatatgcttagaataatgcctctttgttctacatggcaaatagggaccattatggtgtaacaccctgggaaccacaaacaccccgaaatgctactaaactacacaactaaccttcatatataaaatttcgacagcatctcctttgaaaatttgcatagacgtggaagcaacagagtataaacagatctagctagctaagtttaaacggccggccaaacgtgcaagcgctactagacaattcagtacattaaaaacgtccgcaatgtgttattaagttgtctaagcgtcaatttatttacaattgaatatatcctgccattaccgcacccggagcgggcgcgaggccgccaaggcccgaggcgtgaagtttggcccccgccctaccctcaccccggcacagatcgcgcacgcccgcgagctgatcgaccaggaaggccgcaccgtgaaagaggcggctgcactgcttggcgtgcatcgctcgaccctgtaccgcgcacttgagcgcagcgaggaagtgacgcccaccgaggccaggcggcgcggtgccttccgtgaggacgcattgaccgaggccgacgccctggggcccgccgagaatgaacgccaagaggaacaagcatgaaaccgcaccaggacggccaggacgaaccgtttttcattaccgaagagatcgaggcggagatgatcgcggccgggtacgtgttcgagccgcccgcgcacgtctcaaccgtgcggctgcatgaaatcctggccggtttgtctgatgccaagctgggcggcctggccgcccagcttggccgctgaagaaaccgagcgccgccgtctaaaaaggtgatgtgtatttgagtaaaacagcttgcgtcatgcggtcgctgcgtatatgatgcgatgagtaaataaacaaatacgcaaggggaacgcatgaaggttatcgctgtacttaaccagaaaggcgggtcaggcaagacgaccatcgcaacccatctagcccgcgccctgcaactcgccggggccgatgttctgttagtcgattccgatccccagggcagtgcccgcgattgggcggccgtgcgggaagatcaaccgctaaccgttgtcggcatcgaccgcccgacgattgaccgcgacgtgaaggccatcggccggcgcgacttcgtagtgatcgacggagcgccccaggcggcggacttggctgtgtccgcgatcaaggcagccgacttcgtgctgattccggtgcagccaagcccttacgacatatgggccaccgccgacctggtggagctggttaagcagcgcattgaggtcacggatggaaggctacaagcggcctttgtcgtgtcgcgggcgatcaaaggcacgcgcatcggcggtgaggttgccgaggcgctggccgggtacgagctgcccattcttgagtcccgtatcacgcagcgcgtgagctacccaggcactgccgccgccggcacaaccgttcttgaatcagaacccgagggcgacgctgcccgcgaggtccaggcgctggccgctgaaattaaatcaaaactcatttgagttaatgaggtaaagagaaaatgagcaaaagcacaaacacgctaagtgccggccgtccgagcgcacgcagcagcaaggctgcaacgttggccagcctcgcagacacgccagccatgaagcgggtcaactttcagttgccggcggaggatcacaccaagctgaagatgtacgcggtacgccaaggcaagaccattaccgagctgctatctgaatacatcgcgcagctaccagagtaaatgagcaaatgaataaatgagtagatgaattttagcggctaaaggaggcggcatggaaaatcaagaacaaccaggcaccgacgccgtggaatgccccatgtgtggaggaacgggcggttggccaggcgtaagcggctgggttgcctgccggccctgcaatggcactggaacccccaagcccgaggaatcggcgtgagcggtcgcaaaccatccggcccggtacaaatcggcgcggcgctgggtgatgacctggtggagaagttgaaggcagcgcaggccgcccagcggcaacgcatcgaggcagaagcacgccccggtgaatcgtggcaagcagccgctgatcgaatccgcaaagaatcccggcaaccgccggcagccggtgcgccgtcgattaggaagccgcccaagggcgacgagcaaccagattttttcgttccgatgctctatgacgtgggcacccgcgatagtcgcagcatcatggacgtggccgttttccgtctgtcgaagcgtgaccgacgagctggcgaggtgatccgctacgagcttccagacgggcacgtagaggtttccgcagggccggcaggcatggccagtgtgtgggattacgacctggtactgatggcggtttcccatctaaccgaatccatgaaccgataccgggaagggaagggagacaagcccggccgcgtgttccgtccacacgttgcggacgtactcaagttctgccggcgagccgatggcggaaagcagaaagacgacctggtagaaacctgcattcggttaaacaccacgcacgttgccatgcagcgtacgaagaaggccaagaacggccgcctggtgacggtatccgagggtgaagccttgattagccgctacaagatcgtaaagagcgaaaccgggcggccggagtacatcgagatcgagctagctgattggatgtaccgcgagatcacagaaggcaagaacccggacgtgctgacggttcaccccgattactttttgatcgatcccggcatcggccgttttctctaccgcctggcacgccgcgccgcaggcaaggcagaagccagatggttgttcaagacgatctacgaacgcagtggcagcgccggagagttcaagaagttctgtttcaccgtgcgcaagctgatcgggtcaaatgacctgccggagtacgatttgaaggaggaggcggggcaggctggcccgatcctagtcatgcgctaccgcaacctgatcgagggcgaagcatccgccggttcctaatgtacggagcagatgctagggcaaattgccctagcaggggaaaaaggtcgaaaaggtctctttcctgtggatagcacgtacattgggaacccaaagccgtacattgggaaccggaacccgtacattgggaacccaaagccgtacattgggaaccggtcacacatgtaagtgactgatataaaagagaaaaaaggcgatttttccgcctaaaactctttaaaacttattaaaactcttaaaacccgcctggcctgtgcataactgtctggccagcgcacagccgaagagctgcaaaaagcgcctacccttcggtcgctgcgctccctacgccccgccgcttcgcgtcggcctatggcgcgccggaaaatatgcatggcatgcccgttccatacagaagctgggcgaacaaacgatgctcgccttccagaaaaccgaggatgcgaaccacttcatccggggtcagcaccaccggcaagcgccgcgacggccgaggtcttccgatctcctgaagccagggcagatccgtgcacagcaccttgccgtagaagaacagcaaggccgccaatgcctgacgatgcgtggagaccgaaaccttgcgctcgttcgccagccaggacagaaatgcctcgacttcgctgctgcccaaggttgccgggtgacgcacaccgtggaaacggatgaaggcacgaacccagtggacataagcctgttcggttcgtaagctgtaatgcaagtagcgtatgcgctcacgcaactggtccagaaccttgaccgaacgcagcggtggtaacggcgcagtggcggttttcatggcttgttatgactgtttttttggggtacagtctatgcctcgggcatccaagcagcaagcgcgttacgccgtgggtcgatgtttgatgttatggagcagcaacgatgttacgcagcagggcagtcgccctaaaacaaagttaaacatcatgagggaagcggtgatcgccgaagtatcgactcaactatcagaggtagttggcgtcatcgagcgccatctcgaaccgacgttgctggccgtacatttgtacggctccgcagtggatggcggcctgaagccacacagtgatattgatttgctggttacggtgacggtaaggcttgatgaaacaacgcggcgagctttgatcaacgaccttttggaaacttcggcttcccctggagagagcgagattctccgcgctgtagaagtcaccattgttgtgcacgacgacatcattccgtggcgttatccagctaagcgcgaactgcaatttggagaatggcagcgcaatgacattcttgcaggtatcttcgagccagccacgatcgacattgatctggctatcttgctgacaaaagcaagagaacatagcgttgccttggtaggtccagcggcggaggaactctttgatccggttcctgaacaggatctatttgaggcgctaaatgaaaccttaacgctatggaactcgccgcccgactgggctggcgatgagcgaaatgtagtgcttacgttgtcccgcatttggtacagcgcagtaaccggcaaaatcgcgccgaaggatgtcgctgccgactgggcaatggagcgcctgccggcccagtatcagcccgtcatacttgaagctagacaggcttatcttggacaagaagaagatcgcttggcctcgcgcgcagatcagttggaagaatttgtccactacgtgaaaggcgagatcaccaaggtagtcggcaaataatgtctaacaattcgttcaagccgacgccgcttcgcggcgcggcttaactcaagcgttagatgcactatacgtaaccaactagtaggaacagtgaattggagttcgtcttgttataattagcttcttgggggatctttaaatactgtagaaaagaggaaggaaataataaatggctaaaatgagaatatcaccggaattgaaaaaactgatcgaaaaataccgctgcgtaaaagatacggaaggaatgtctcctgctaaggtatataagctggtgggagaaaatgaaaacctatatttaaaaatgacggacagccggtataaagggaccacctatgatgtggaacgggaaaaggacatgatgctatggctggaaggaaagctgcctgttccaaaggtcctgcactttgaacggcatgatggctggagcaatctgctcatgagtgaggccgatggcgtcctttgctcggaagagtatgaagatgaacaaagccctgaaaagattatcgagctgtatgcggagtgcatcaggctctttcactccatcgacatatcggattgtccctatacgaatagcttagacagccgcttagccgaattggattacttactgaataacgatctggccgatgtggattgcgaaaactgggaagaagacactccatttaaagatccgcgcgagctgtatgattttttaaagacggaaaagcccgaagaggaacttgtcttttcccacggcgacctgggagacagcaacatctttgtgaaagatggcaaagtaagtggctttattgatcttgggagaagcggcagggcggacaagtggtatgacattgccttctgcgtccggtcgatcagggaggatatcggggaagaacagtatgtcgagctattttttgacttactggggatcaagcctgattgggagaaaataaaatattatattttactggatgaattgttttagtacctagatacttcgctcgtgaaaagcagcgctcagggggctagtgcgctcttccgcttcctcgctcactgactcgctgcgctcggtcgt

SEQ ID NO: 101 - DNA, 24231 bp, Artificial Sequence
  Nucleotide sequence of Vector 13
tcggctgcggcgagcggtatcagctcactcaaaggcggtaatacggttatccacagaatcaggggataacgcaggaaagaacatgtgagcaaaaggccagcaaaaggccaggaaccgtaaaaaggccgcgttgctggcgtttttccataggctccgcccccctgacgagcatcacaaaaatcgacgctcaagtcagaggtggcgaaacccgacaggactataaagataccaggcgtttccccctggaagctccctcgtgcgctctcctgttccgaccctgccgcttaccggatacctgtccgcctttctcccttcgggaagcgtggcgctttctcatagctcacgctgtaggtatctcagttcggtgtaggtcgttcgctccaagctgggctgtgtgcacgaaccccccgttcagcccgaccgctgcgccttatccggtaactatcgtcttgagtccaacccggtaagacacgacttatcgccactggcagcagccactggtaacaggattagcagagcgaggtatgtaggcggtgctacagagttcttgaagtggtggcctaactacggctacactagaagaacagtatttggtatctgcgctctgctgaagccagttaccttcggaaaaagagttggtagctcttgatccggcaaacaaaccaccgctggtagcggtggtttttttgtttgcaagcagcagattacgcgcagaaaaaaaggatctcaagaagatcctttgatcttttctacggggtctgacgctcagtggaacgaaaactcacgttaagggattttggtcatgagattatcaaaaaggatcttcacctagatccttttaaattaaaaatgaagcgtacgttggaatcgcttctacaaaactcacagaaacaatcaaacaaacatacacagcgatttattcacacgaacccgaattacaacggtatatatcctgtcagccaacaccaaaacatcaaaaaaatcgggatcaggatcaggatctgcggccgcatcctgcaggagctcaaacgagcaggaagcaacgagagggtggcgcgcgaccgacgtgcgtacgtagcatgagcctgagtggagacgttggacgtgtatgtatatacctctctgcgtgttaactatgtacgtaagcggcaggcagtgcaataagtgtggctctgtagtatgtacgtgcgggtacgatgctgtaagctactgaggcaagtccataaataaataatgacacgtgcgtgttctataatctcttcgcttcttcatttgtccccttgcggagtttggcatccattgatgccgttacgctgagaacagacacagcagacgaaccaaaagtgagttcttgtatgaaactatgacccttcatcgctaggctcaaacagcaccccgtacgaacacagcaaattagtcatctaactattagcccctacatgtttcagacgatacataaatatagcccatccttagcaattagctattggccctgcccatcccaagcaatgatctcgaagtatttttaatatatagtatttttaatatgtagcttttaaaattagaagataattttgagacaaaaatctccaagtatttttttgggtattttttactgcctccgtttttctttatttctcgtcacctagtttaattttgtgctaatcggctataaacgaaacagagagaaaagttactctaaaagcaactccaacagattagatataaatcttatatcctgcctagagctgttaaaaagatagacaactttagtggattagtgtatgcaacaaactctccaaatttaagtatcccaactacccaacgcatatcgttcccttttcattggcgcacgaactttcacctgctatagccgacgtacatgttcgttttttttgggcggcgcttactttcttccccgttcgttctcagcatcgcaactcaatttgttatggcggagaagcccttgtatcccaggtagtaatgcacagatatgcattattattattcataaaacgaacgctcttcaactggaagagcggttactaccggttcactagctagctgctaatcgagctagttaccctatgaggtgacatgaagcgctcacggttactatgacggttagcttcacgactgttggtggcagtagcgtacgacttagctatagttccggacttacctagctaggttaccagagctggtcaccttcttcatcgctaagaagacactcagtagtccggaccgatatcgctatcaactttgtatagaaaagttgggccgaattcgagctcggtacggccagaatggcccggaccgaagcttgcatgcggatccccgggtgtgatttagtataaagtgaagtaatggtcaaaagaaaaagtgtaaaacgaagtacctagtaataagtaatattgaacaaaataaatggtaaagtgtcagatatataaaataggctttaataaaaggaagaaaaaaaacaaacaaaaaataggttgcaatggggcagagcagagtcatcatgaagctagaaaggctaccgatagataaactatagttaattaaatacattaaaaaatacttggatctttctcttaccctgtttatattgagacctgaaacttgagagagatacactaatcttgccttgttgtttcattccctaacttacaggactcagcgcatgtcatgtggtctcgttccccatttaagtcccacaccgtctaaacttattaaattattaatgtttataactagatgcacaacaacaaagcttgcaaccacagctgctgtcaagttttagagctagaaatagcaagttaaaataaggctagtccgttatcaacttgaaaaagtggcaccgagtcggtgctttttttactagtcctgcaggggcgcgccggtcacccggtccgggcctagaaggccacccagctttcttgtacaaagtggggatcggccagaatggcccggaccgggttaccagtctaaaaacggcccctaactaacgcttagttgcccgctagattagtcccccgttagtgcctagttagacacacgacgaactaggggctactagtagcggccgcaattggatcgggtttacttattttgtgggtatctatacttttattagatttttaatcaggctcctgatttctttttatttcgattgaattcctgaacttgtattattcagtagatcgaataaattataaaaagataaaatcataaaataatattttatcctatcaatcatattaaagcaatgaatatgtaaaattaatcttatctttattttaaaaaatcatataggtttagtatttttttaaaaataaagataggattagttttactattcactgcttattacttttaaaaaaatcataaaggtttagtatttttttaaaataaatataggaatagttttactattcactgctttaatagaaaaatagtttaaaatttaagatagttttaatcccagcatttgccacgtttgaacgtgagccgaaacgatgtcgttacattatcttaacctagctgaaacgatgtcgtcataatatcgccaaatgccaactggactacgtcgaacccacaaatcccacaaagcgcgtgaaatcaaatcgctcaaaccacaaaaaagaacaacgcgtttgttacacgctcaatcccacgcgagtagagcacagtaaccttcaaataagcgaatggggcataatcagaaatccgaaataaacctaggggcattatcggaaatgaaaagtagctcactcaatataaaaatctaggaaccctagttttcgttatcactctgtgctccctcgctctatttctcagtctctgtgtttgcggctgaggattccgaacgagtgaccttcttcgtttctcgcaaaggtaacagcctctgctcttgtctcttcgattcgatctatgcctgtctcttatttacgatgatgtttcttcggttatgtttttttatttatgctttatgctgttgatgttcggttgtttgtttcgctttgtttttgtggttcagttttttaggattcttttggtttttgaatcgattaatcggaagagattttcgagttatttggtgtgttggaggtgaatcttttttttgaggtcatagatctgttgtatttgtgttataaacatgcgactttgtatgattttttacgaggttatgatgttctggttgttttattatgaatctgttgagacagaaccatgatttttgttgatgttcgtttacactattaaaggtttgttttaacaggattaaaagttttttaagcatgttgaaggagtcttgtagatatgtaaccgtcgatagtttttttgtgggtttgttcacatgttatcaagcttaatcttttactatgtatgcgaccatatctggatccagcaaaggcgattttttaattccttgtgaaacttttgtaatatgaagttgaaattttgttattggtaaactataaatgtgtgaagttggagtatacctttaccttcttatttggctttgtgatagtttaatttatatgtattttgagttctgacttgtatttctttgaattgattctagtttaagtaatccatggcacctaaaaagaagaggaaagttatggacaaaaagtactccatagggctcgatatcggcacaaacagtgtggggtgggcagtcatcactgacgactacaaggtcccctccaagaagttcaaggtcctcggcaatacagaccgccactccatcaagaagaacctcatcggagcactgttgttcgactccggagaaactgccgaagcaaccagactcaagaggaccgccagaagaaggtacacaaggcgcaagaacaggatctgctacctccaggagatcttcagtaacgagatggcaaaggtcgacgactctttcttccacaggctcgaggaatccttcctcgtcgaggaggacaagaagcatgagagacaccccatcttcggaaacatcgtcgacgaggtaagtttctgcttctacctttgatatatatataataattatcattaattagtagtaatataatatttcaaatatttttttcaaaataaaagaatgtagtatatagcaattgcttttctgtagtttataagtgtgtatattttaatttataacttttctaatatatgaccaaaacatggtgatgtgcaggtcgcctaccacgagaagtacccaaccatctaccacctgaggaagaagctcgtcgacagtaccgacaaggctgacctcaggctcatctacctcgcactcgcccacatgattaagttcaggggccacttcctcatagagggagacctcaacccagacaactccgacgtcgacaaactcttcatccaactcgtgcagacctacaatcaactctttgaagagaacccaatcaacgcctccggagtggatgctaaggctatattgtccgccaggctctccaaatcaagacgcctcgaaaacctcatcgcccagctcccaggggagaagaaaaatagcctcttcgggaacctcatagccctgtcccttggactcacccctaacttcaaatcaaatttcgacctcgcagaggacgctaagcttcaactctccaaggacacctacgacgacgacctcgataacctcctcgcccaaatcggtgatcaatacgctgacctcttcctcgctgctaagaacctctccgacgccatactcctctccgacattctgagggtcaacaccgagatcacaaaggctcccttgtccgcctccatgattaaacgctacgacgaacaccaccaggacctcaccctcttgaaggcactggttagacagcagctccccgagaagtacaaggaaatcttcttcgaccaatcaaaaaacggctacgccggatacatcgacggaggagcatcccaggaagagttctacaagttcatcaaaccaattctcgaaaagatggacggaacagaggagctcttggtcaagctcaacagggaggacctcctcagaaagcagagaaccttcgacaacggcagtatcccccaccagatccaccttggagagttgcacgcaatcctcaggaggcaagaggacttctaccccttcctcaaggacaacagggagaagatcgagaagatccttacattccgcatcccctactacgtcggacctttggcaagaggaaactcccgcttcgcatggatgactcgcaagagtgaggaaaccatcaccccttggaacttcgaggaggtcgtcgataagggagcttcagcccagtccttcatcgagcgcatgaccaacttcgataaaaatctccccaatgaaaaagtcctccccaagcacagtctgctctacgagtacttcacagtctacaacgagctcaccaaggtcaagtacgtcaccgaaggcatgagaaaacccgccttcctcagtggcgagcagaagaaggcaatcgtggacttgctgttcaagaccaaccgcaaggtcacagtcaagcaattaaaagaggactacttcaagaaaatagagtgcttcgacagtgtcgagatctctggggtcgaggacaggttcaacgcatccttggggacctatcacgacctcctcaagatcattaaagacaaggacttcctcgacaacgaggagaacgaggacatactggaggacatcgtcctcaccctcactctctttgaggacagggagatgatagaggagcgcctcaaaacctacgcccacctcttcgacgacaaggtgatgaaacagctcaagaggcgcagatacaccggatggggtagactctccaggaagctgattaatggcatccgcgacaaacagtccggcaagaccatcctcgacttcctcaagagtgacggattcgccaaccgcaacttcatgcagctcatacacgacgactccctcaccttcaaggaggacatccaaaaagcccaagtctccggacagggagactcattgcacgaacacatcgccaacttggctggatctcctgctattaaaaagggcatcctccaaaccgtcaaggtggtcgacgaactcgtcaaggtcatgggtagacacaagcccgaaaatatcgtcatcgagatggcaagggagaaccagacaacccagaagggccaaaaaaactccagggagcgcatgaaacgcatcgaggagggaataaaggagctcgggtcccagatcctcaaggagcaccccgtcgaaaatactcaactccagaatgaaaagctctacctctactacctccaaaacggcagggatatgtacgtcgaccaagagctcgacattaatcgcctctccgactacgacgtcgatcacatcgtcccccagagtttcctcaaggacgactccatcgacaacaaggtcctcaccagatccgataaaaatcgcggaaagtccgacaacgtcccctctgaggaagtggttaagaagatgaaaaactactggagacagctcctcaacgcaaagctgatcacccagcgcaagttcgacaacctcacaaaggctgagagagggggactctctgagttggacaaggccggcttcatcaagagacaactcgtggaaacccgccagatcaccaagcatgtcgcacagattctcgactcccgcatgaatactaaatacgatgaaaatgacaagctcatcagggaggtcaaggtcatcaccctgaagtccaagctcgtctccgacttccgcaaggacttccagttctacaaggtccgcgagatcaacaactaccaccacgcccacgacgcatacctcaacgctgtggttggaacagcactcatcaagaagtaccccaagctcgagtccgagttcgtctacggcgactacaaggtctacgacgtcaggaagatgatcgccaagtccgagcaagagatcggaaaggccaccgcaaaatatttcttctactccaacataatgaacttcttcaaaaccgagatcaccctggctaacggagaaataaggaagaggcccctgatagaaaccaacggcgagacaggcgagattgtctgggacaaaggcagggacttcgcaaccgtcagaaaggtgctcagtatgcctcaggtcaacatagtcaaaaagaccgaagtccagactggaggattctccaaggagtccatcctccccaaaaggaactccgacaaactgatcgccaggaaaaaggactgggaccccaaaaaatatggcggcttcgactcccctactgttgcttacagtgtgctcgtcgtcgcaaaagtcgagaaggggaaatccaagaagctcaagtcagtgaaggagctcctcggcatcaccatcatggagaggtcctccttcgagaagaaccccatcgacttcctcgaggccaagggatataaggaggtcaagaaggacctcatcattaaactccccaagtactccctcttcgagctcgaaaacggacgcaagaggatgctcgcttcagctggtgaactccagaagggcaacgaactcgctttgccctctaaatacgtcaacttcctctacctcgcctcccactatgaaaagctcaagggctccccagaggacaacgagcagaagcaactcttcgtcgagcagcacaagcattacctcgacgagatcatcgagcagatctccgagttctccaagagagtcatcctcgctgacgcaaacctcgacaaggtcctcagtgcatataacaagcaccgcgacaaaccaataagggagcaggccgaaaatattatacacctgttcaccctcaccaacttgggagcaccagccgccttcaagtatttcgacaccaccatcgacagaaagcgctacacctccacaaaggaggtcctggacgccacacttatccaccagtccatcaccggcctctatgaaacacgcatcgacctctctcaattgggaggggacaagagaccaagagacagacacgatggagagcttggaggtagaaagagagcaaggtagttcgaactggccaggtaccgttaacctagacttgtccatcttctggattggccaacttaattaatgtatgaaataaaaggatgcacacatagtgacatgctaatcactataatgtgggcatcaaagttgtgtgttatgtgtaattactagttatctgaataaaagagaaagagatcatccatatttcttatcctaaatgaatgtcacgtgtctttataattctttgatgaaccagatgcatttcattaaccaaatccatatacatataaatattaatcatatataattaatatcaattgggttagcaaaacaaatctagtctaggtgtgttttgcaagcttggcgcgccgttaacttaacggcaaacgctaattagtcactaggcccaggaaacactaactaagccctagcttatcctagcgcaacctagttaggtcttggtaacccggtccgggccattctggccgatcccgggcaactttattatacaaagttgatagatatcggtccgacggccagaatggccatctggattcagcaggcctagaaggccatttagtcctagcgatatcaggatattcttgtttaagatgttgaactctatggaggtttgtatgaactgatgatctaggaccggataagttcccttcttcatagcgaacttattcaaagaatgttttgtgtatcattcttgttacattgttattaatgaaaaaatattattggtcattggactgaacacgagtgttaaatatggaccaggccccaaataagatccattgatatatgaattaaataacaagaataaatcgagtcaccaaaccacttgccttttttaacgagacttgttcaccaacttgatacaaaagtcattatcctatgcaaatcaataatcatacaaaaatatccaataacactaaaaaattaaaagaaatggataatttcacaatatgttatacgataaagaagttacttttccaagaaattcactgattttataagcccacttgcattagataaatggcaaaaaaaaacaaaaaggaaaagaaataaagcacgaagaattctagaaaatacgaaatacgcttcaatgcagtgggacccacggttcaattattgccaattttcagctccaccgtatatttaaaaaataaaacgataatgctaaaaaaatataaatcgtaacgatcgttaaatctcaacggctggatcttatgacgaccgttagaaattgtggttgtcgacgagtcagtaataaacggcgtcaaagtggttgcagccggcacacacgagtcgtgtttatcaactcaaagcacaaatacttttcctcaacctaaaaataaggcaattagccaaaaacaactttgcgtgtaaacaacgctcaatacacgtgtcattttattattagctattgcttcaccgccttagctttctcgtgacctagtcgtcctcgtcttttcttcttcttcttctataaaacaatacccaaagagctcttcttcttcacaattcagatttcaatttctcaaaatcttaaaaactttctctcaattctctctaccgtgatcaaggtaaatttctgtgttccttattctctcaaaatcttcgattttgttttcgttcgatcccaatttcgtatatgttctttggtttagattctgttaatcttagatcgaagacgattttctgggtttgatcgttagatatcatcttaattctcgattagggtttcatagatatcatccgatttgttcaaataatttgagttttgtcgaataattactcttcgatttgtgatttctatctagatctggtgttagtttctagtttgtgcgatcgaatttgtcgattaatctgagtttttctgattaacagccatggctgcaactactcttacatctgctttacctggtgctttcagttcatcccagagaccaagtgctcctttcaacttacaaagatcacctagagtgcttagaaggttcaacagaaagacaggacgtcaacctcgtggacttgttcgtgctgcaaaggctcaagcggcgcaaaacctgccagagaaattcgatgaaacaagactctgggaggccctcaggggatttggggttagtccaagtagggttacttacgctcccgtcggattcggagattaccactggaccgtcacagatgaagacgggagaccttggttcgcaactgtcagtgacctcgaacacaaagagcattgcgggcagggagcacaagcagcccttaaaggactcagacaagctatggacactgccctcgcacttagagatagggacggactcagattcgtggttgctccagtggcagcaacagatgggggtggccctgtccttccccttgacgctaggtatgcactcacagtcttccctcacgtcccaggaagaacaggagagttcggacaaagactcacagaggcagagagggacagactgcttgctcttctggcagaactccacggaagaacacctcctgaaacaaccccaccagccgatatggaaccaccaggacttcctggtgttagagcagcactcgccgaaagtgaaggaccttggagtggaggaccatttgcagaacccgctagacttcttctcagagaacacgaggccacactgcacgcaagactcgctgaattcgaagccctcgtcgcaagagttaagggtcgtggagcacctcttgtcgttacccacggagaaccacacccaggcaacttgatcctcggagaggaaggctatctcctcgtggactgggatacagttggactggctccagctgaaagggatttgagtctcatctcagacgacccagctgacctcgcaagatacgcagagcttacaggaagaactccagacccagacgcactcgcactctatagactgcgttggagtctccttgatgtggctgagttcgtcgagtggttcagggctgaacaccaaagaacccaagacaccgagagtgcatggaaggggttcactgacacacttgggcaattggctgctggtggatcagctgcatagcctaggaaacttatctctgttatgaatcagaagaagttcatgtctcgtttcatttaaaactttggtggtttgtgttttggggccttgtaaagcccctgatgaataattgttcaactatgtttccgttcctgtgttatacctttctttctaatgagtaatgacatcaaacttcttctgtattgaaattatgtccttgtgagtctctttatcatcgtttcgtctttacattatatgtgctacttttgtctaatgagcctgaaaagtggctccaatggtacgcactggaagatttgttggcttctggtagatatagcgacagtgttgagcttgtaatatcatgtctcttattgctaaattagttcctttcttaacagaaaccttcaaagtttttgtttttgttttcatttacctaatgtacacatacgctggccatgactaacaacatgtccaggcttagagcatatttttttctagcttaaattgttaacttgtcattcagtaaaatccgagaattgtgaagctctaattgaagctaattcgttttataaagtcagttaaaaagtatactaaattatccaacttttcttcaaaatctcaaaattctatgacaaaacgatagtctttgtttatgtcagtaccacaaagaggtggaaaaaaacaccaaaaaaacaataagcaaactatacactgagaagaaaaataaaagagagctcaatagatgttttatactaacggtagattagatcaaagatccaagctttactctacatagagcagaacccagaatcccttcatatctcttttattctagcaccgataatctactgaaaagaagacacttagagctctgtctctttgtcaaagaagtcccagccgtcatccagaagctccttacgttcattaacagagaattcgtgaaatggaacgtgtgtgatgggtacaagttgcttgtggtgtatcatgtatgagtataaaatttagctcaaataacttatcattgaacggacttagttatacttttttttttttttatctttctaatacatatatttcgttgttataaaagtagaaatgttcgatttctgtaaaattatcgttgatttttcttccacgtaaaataaaattaaaatatgttatatttttagaacataacaagattcgtgtaaatttaaatttgtgagaatttctaaaaatcaattaaaaatcatcacaaattacagaaaaaccatcataaattatagaataaaaataaatacaaatacaaattatgatggtttttaacctcaaacttaaatcttaaatatatttttaacctttaaagatatgattttttggagggcaaaaatatgacctttcttcaaagtagtccatttgtttgtatttattattaattgtaaatattatttttagcaccaaaatatcttggcataaaattaaaacacacattttttttctaaggtaaacattaaaaaaagaactcattccaaaaaagtaacatgtttcaaaaaatccaaaaacatttaaattttaaaataattctagtaatagtatttatatttaatattaaaactcacaaataaatgagattgcccgttttatataaaattgggatgagtaaatatgtatgatacaattatataaggacaattaagtataattatgtgtgcatgttaaagttgatttaattaaataagatgcgtaaattattataacttttttttaacatttatacttgctaacacaccccatattcacatgataataggaggcatctctaatgagttgatatttttacacgagagtgatgagtaagtttgaattatgcaatcataaatagtaaaatttaacaatcaatatttatttaccttatttgtaagtgaaaaaaaatatttgtatatatattataatttaaagtataaatgaatttaaatgaaatattaggctgtgaaattaatcataagattcacaaataagaatctagatgaattaattaatacccatagtgaaaaatagtggtctcattaagaaaaaaattgaaaactcaagtttatgttgtgcacttttgctatgtaagagagaggaaaggattaaaatgaaatgagcaagctttataaaaaaatataaatttaaaaaaaaaaaaaaaaaaaaagcacgaggtagagtagaatgattgcatgagtggcacatggtgacaaattcgagacagatattttcacacctttccatcacatcaactctcccccgttgatcatcatttaatatctcatccaacggcaaacaaacgtacattttagaacataccagaaaatccctctctctcatcaatccacccaagtgatgaaaacgacgtcgacgtgggagaagatccgcaaacggattagacgcgtcgtcagatttcgacacgtgtacggtggatgtttcggactctctcccctcaaccgctttataaattggggtcgtggcttcgccttgaaactcgttctagtgtatgtgattgttgtgactcgttcttcttcgtcgttatcttcttcttttgttgtttgtgtgtttgttttttctctcacctgtaaggatccgccatggcctcctccgagaacgtcatcaccgagttcatgcgcttcaaggtgcgcatggagggcaccgtgaacggccacgagttcgagatcgagggcgagggcgagggccgcccctacgagggccacaacaccgtgaagctgaaggtgacgaagggcggccccctgcccttcgcctgggacatcctgtccccccagttccagtacggctccaaggtgtacgtgaagcaccccgccgacatccccgactacaagaagctgtccttccccgagggcttcaagtgggagcgcgtgatgaacttcgaggacggcggcgtggcgaccgtgacccaggactcctccctgcaggacggctgcttcatctacaaggtgaagttcatcggcgtgaacttcccctccgacggccccgtgatgcagaagaagaccatgggctgggaggcctccaccgagcgcctgtacccccgcgacggcgtgctgaagggcgagacccacaaggccctgaagctgaaggacggcggccactacctggtggagttcaagtccatctacatggccaagaagcccgtgcagctgcccggctactactacgtggacgccaagctggacatcacctcccacaacgaggactacaccatcgtggagcagtacgagcgcaccgagggccgccaccacctgttcctgtagttttgtgatctgatgataagtggttggttcgtgtctcatgcacttgggaggtgatctatttcacctggtgtagtttgtgtttccgtcagttggaaaaacttatccctatcgatttcgttttcattttctgcttttcttttatgtaccttcgtttgggcttgtaacgggcctttgtatttcaactctcaataataatccaagtgcatgttaaacaatttgtcatctgtttcggctttgatatactactggtgaagatgggccgtactactgcatcacaacgaaaaataataataagatgaaaaacttgaagtggaaaaaaaaaaaacttgaatgttcactactactcattgaccataatgtttaacatacatagctcaatagtatttttgtgaatatggcaacacaaacagtccaaaacaattgtctcttactataccaaaccaagggcgccgcttgtttgccactctttgtgtgcaatagtgtgattaccacatctccacattcaatatattccctgaattatctgacgattttgatggctcactgttttcccaagtcttgaattgtcttctgtgcgccagtcaaatgcatatgtgttgagtttatcttttaaatatcaagcttttgtttttaacttttgtttgtaaccaaaaactcacagtaggagtttgatcacataattttatgtttgcctttgcaatttctagtgagtctttgattaaaagcttgaaaagaaaatgcagccaagcttaccaagtaagttatgtgtattaaccagaggaagagagaatcttgcaaaatttcaacaaacacaaaaagaagtattactacgattggtggagaaagaaaacgattccaaatcttgaactgttgttgtaaaagcatagcagaaagtgggagacaaccgaaatagaaatgactataacttaatttaatgttatcattataatttcttctagcaaatatttagaaagtaaatatcacatcaacctttaatgtaattaagctttctctttttgattcatgtgagatgaaaagaaaaaaaagaagagaaaagtgtagaaaacacatcatttctaagctgaagccacttacgcttgattccgatgacttcgtaggttcctagctcaagccgctcgtgtccaagcgtcacttacgattagctaatgattacggcatctaggaccgactagcggtacggcaaccacagctgctgtcaaaggagataaaccctcccccaaaacacaaattagaatgacatttcaagttccatgtatgtcactttcattctattatttttacaacttttagttacttaacagatgtcttgttcagcataaattataatttattctgtttttttttagggaacaactgttgtagacaacttgttgtatagtgaggatattcattacatgcttggtgcattaaggacccttggactgcgtgtggaagatgacaaaacaaccaaacaagcaattgttgaaggctgtgggggattgtttcccactagtaaggaatctaaagatgaaatcaatttattccttggaaatgctggtattgcaatgagatctttgacagcagctgtggttgctgcaggtggaaatgcaaggtctgttttttttttttttgttcagcataatctttgaattgttcctcgtataactaatcacaacagagtacgtgttcttcttcctgttataatctaaaaatctcatccagattagtcatcctttcttcttaaaaggaacctttaattatcaatgtatttatttaatatttaaattagcttgtcaaagtctagcatatacatattttgattatattctgagaaatgcacctgagggtgttcctcatgatctacttcaacctctgttattattagattttctatcatgattactggtttgagtctctaagtagaccatcttgatgttcaaaatatttcagctacgtacttgatggggtgccccgaatgagagagaggccaattggggatttggttgctggtcttaagcaacttggtgcagatgttgattgctttcttggcacaaactgtccacctgttcgtgtaaatgggaagggaggacttcctggcggaaaggtatggtttggatttcatttagaataaggtggagtaactttcctggatcaaaattctaatttaagaagcctccctgttttcctctctttagaataagactaagggtaggtttaggagttgggttttggagagaaatggaagggagagcaatttttttcttcttctaataaatattctttaatttgatacattttttaagtaaaagaatataaagatagattagcataacttaatgttttaatcttttatttatttttataaatattatatacctgtctatttaaaaatcaaatatttgtcctccattccctttcccttcaaaacctcagttccaaatataccgtagttgaattatattttggaaggcctattggttggagacttttccttttcagagattatccctcacctttattatagcctttctatttttaaacttcatatagacgccattcttggggcaaccacagctgctgtcaaaggcgtaccattcttatgtgcttctagtctccaaatgtggttgatagttattttgctctaagatcaacagtaatgaagtataaatcatcgttgtggtgtgctactcggttaattgagcattaacacacacaaacatgacgaggatggtataatctccaaaaatgtgtactttgttaggtgggaccctatagccttgattaatgtgctatgttaggcatgcctggaaacgtgtgacgcatatgttttgtgaacctgttgatattatatgtgcttttatattaccatattttattaaaatactaatatttattactagtaagatataacattctatctagcttaaaaactaaccataaatattccataataactagatttaccaaactaatatactaaatatacataataaatacaaaattaacaagacaataatcaatatttatgagcttaatatatttagacattatggttggtcgacgataatcatgctaacttttcgtaattgcttgattgaaatatgcttagaataatgcctctttgttctacatggcaaatagggaccattatggtgtaacaccctgggaaccacaaacaccccgaaatgctactaaactacacaactaaccttcatatataaaatttcgacagcatctcctttgaaaatttgcatagacgtggaagcaacagagtataaacagatctagctagctaagtttaaacggccggccaaacgtgcaagcgctactagacaattcagtacattaaaaacgtccgcaatgtgttattaagttgtctaagcgtcaatttatttacaattgaatatatcctgccattaccgcacccggagcgggcgcgaggccgccaaggcccgaggcgtgaagtttggcccccgccctaccctcaccccggcacagatcgcgcacgcccgcgagctgatcgaccaggaaggccgcaccgtgaaagaggcggctgcactgcttggcgtgcatcgctcgaccctgtaccgcgcacttgagcgcagcgaggaagtgacgcccaccgaggccaggcggcgcggtgccttccgtgaggacgcattgaccgaggccgacgccctggggcccgccgagaatgaacgccaagaggaacaagcatgaaaccgcaccaggacggccaggacgaaccgtttttcattaccgaagagatcgaggcggagatgatcgcggccgggtacgtgttcgagccgcccgcgcacgtctcaaccgtgcggctgcatgaaatcctggccggtttgtctgatgccaagctgggcggcctggccgcccagcttggccgctgaagaaaccgagcgccgccgtctaaaaaggtgatgtgtatttgagtaaaacagcttgcgtcatgcggtcgctgcgtatatgatgcgatgagtaaataaacaaatacgcaaggggaacgcatgaaggttatcgctgtacttaaccagaaaggcgggtcaggcaagacgaccatcgcaacccatctagcccgcgccctgcaactcgccggggccgatgttctgttagtcgattccgatccccagggcagtgcccgcgattgggcggccgtgcgggaagatcaaccgctaaccgttgtcggcatcgaccgcccgacgattgaccgcgacgtgaaggccatcggccggcgcgacttcgtagtgatcgacggagcgccccaggcggcggacttggctgtgtccgcgatcaaggcagccgacttcgtgctgattccggtgcagccaagcccttacgacatatgggccaccgccgacctggtggagctggttaagcagcgcattgaggtcacggatggaaggctacaagcggcctttgtcgtgtcgcgggcgatcaaaggcacgcgcatcggcggtgaggttgccgaggcgctggccgggtacgagctgcccattcttgagtcccgtatcacgcagcgcgtgagctacccaggcactgccgccgccggcacaaccgttcttgaatcagaacccgagggcgacgctgcccgcgaggtccaggcgctggccgctgaaattaaatcaaaactcatttgagttaatgaggtaaagagaaaatgagcaaaagcacaaacacgctaagtgccggccgtccgagcgcacgcagcagcaaggctgcaacgttggccagcctcgcagacacgccagccatgaagcgggtcaactttcagttgccggcggaggatcacaccaagctgaagatgtacgcggtacgccaaggcaagaccattaccgagctgctatctgaatacatcgcgcagctaccagagtaaatgagcaaatgaataaatgagtagatgaattttagcggctaaaggaggcggcatggaaaatcaagaacaaccaggcaccgacgccgtggaatgccccatgtgtggaggaacgggcggttggccaggcgtaagcggctgggttgcctgccggccctgcaatggcactggaacccccaagcccgaggaatcggcgtgagcggtcgcaaaccatccggcccggtacaaatcggcgcggcgctgggtgatgacctggtggagaagttgaaggcagcgcaggccgcccagcggcaacgcatcgaggcagaagcacgccccggtgaatcgtggcaagcagccgctgatcgaatccgcaaagaatcccggcaaccgccggcagccggtgcgccgtcgattaggaagccgcccaagggcgacgagcaaccagattttttcgttccgatgctctatgacgtgggcacccgcgatagtcgcagcatcatggacgtggccgttttccgtctgtcgaagcgtgaccgacgagctggcgaggtgatccgctacgagcttccagacgggcacgtagaggtttccgcagggccggcaggcatggccagtgtgtgggattacgacctggtactgatggcggtttcccatctaaccgaatccatgaaccgataccgggaagggaagggagacaagcccggccgcgtgttccgtccacacgttgcggacgtactcaagttctgccggcgagccgatggcggaaagcagaaagacgacctggtagaaacctgcattcggttaaacaccacgcacgttgccatgcagcgtacgaagaaggccaagaacggccgcctggtgacggtatccgagggtgaagccttgattagccgctacaagatcgtaaagagcgaaaccgggcggccggagtacatcgagatcgagctagctgattggatgtaccgcgagatcacagaaggcaagaacccggacgtgctgacggttcaccccgattactttttgatcgatcccggcatcggccgttttctctaccgcctggcacgccgcgccgcaggcaaggcagaagccagatggttgttcaagacgatctacgaacgcagtggcagcgccggagagttcaagaagttctgtttcaccgtgcgcaagctgatcgggtcaaatgacctgccggagtacgatttgaaggaggaggcggggcaggctggcccgatcctagtcatgcgctaccgcaacctgatcgagggcgaagcatccgccggttcctaatgtacggagcagatgctagggcaaattgccctagcaggggaaaaaggtcgaaaaggtctctttcctgtggatagcacgtacattgggaacccaaagccgtacattgggaaccggaacccgtacattgggaacccaaagccgtacattgggaaccggtcacacatgtaagtgactgatataaaagagaaaaaaggcgatttttccgcctaaaactctttaaaacttattaaaactcttaaaacccgcctggcctgtgcataactgtctggccagcgcacagccgaagagctgcaaaaagcgcctacccttcggtcgctgcgctccctacgccccgccgcttcgcgtcggcctatggcgcgccggaaaatatgcatggcatgcccgttccatacagaagctgggcgaacaaacgatgctcgccttccagaaaaccgaggatgcgaaccacttcatccggggtcagcaccaccggcaagcgccgcgacggccgaggtcttccgatctcctgaagccagggcagatccgtgcacagcaccttgccgtagaagaacagcaaggccgccaatgcctgacgatgcgtggagaccgaaaccttgcgctcgttcgccagccaggacagaaatgcctcgacttcgctgctgcccaaggttgccgggtgacgcacaccgtggaaacggatgaaggcacgaacccagtggacataagcctgttcggttcgtaagctgtaatgcaagtagcgtatgcgctcacgcaactggtccagaaccttgaccgaacgcagcggtggtaacggcgcagtggcggttttcatggcttgttatgactgtttttttggggtacagtctatgcctcgggcatccaagcagcaagcgcgttacgccgtgggtcgatgtttgatgttatggagcagcaacgatgttacgcagcagggcagtcgccctaaaacaaagttaaacatcatgagggaagcggtgatcgccgaagtatcgactcaactatcagaggtagttggcgtcatcgagcgccatctcgaaccgacgttgctggccgtacatttgtacggctccgcagtggatggcggcctgaagccacacagtgatattgatttgctggttacggtgacggtaaggcttgatgaaacaacgcggcgagctttgatcaacgaccttttggaaacttcggcttcccctggagagagcgagattctccgcgctgtagaagtcaccattgttgtgcacgacgacatcattccgtggcgttatccagctaagcgcgaactgcaatttggagaatggcagcgcaatgacattcttgcaggtatcttcgagccagccacgatcgacattgatctggctatcttgctgacaaaagcaagagaacatagcgttgccttggtaggtccagcggcggaggaactctttgatccggttcctgaacaggatctatttgaggcgctaaatgaaaccttaacgctatggaactcgccgcccgactgggctggcgatgagcgaaatgtagtgcttacgttgtcccgcatttggtacagcgcagtaaccggcaaaatcgcgccgaaggatgtcgctgccgactgggcaatggagcgcctgccggcccagtatcagcccgtcatacttgaagctagacaggcttatcttggacaagaagaagatcgcttggcctcgcgcgcagatcagttggaagaatttgtccactacgtgaaaggcgagatcaccaaggtagtcggcaaataatgtctaacaattcgttcaagccgacgccgcttcgcggcgcggcttaactcaagcgttagatgcactatacgtaaccaactagtaggaacagtgaattggagttcgtcttgttataattagcttcttgggggatctttaaatactgtagaaaagaggaaggaaataataaatggctaaaatgagaatatcaccggaattgaaaaaactgatcgaaaaataccgctgcgtaaaagatacggaaggaatgtctcctgctaaggtatataagctggtgggagaaaatgaaaacctatatttaaaaatgacggacagccggtataaagggaccacctatgatgtggaacgggaaaaggacatgatgctatggctggaaggaaagctgcctgttccaaaggtcctgcactttgaacggcatgatggctggagcaatctgctcatgagtgaggccgatggcgtcctttgctcggaagagtatgaagatgaacaaagccctgaaaagattatcgagctgtatgcggagtgcatcaggctctttcactccatcgacatatcggattgtccctatacgaatagcttagacagccgcttagccgaattggattacttactgaataacgatctggccgatgtggattgcgaaaactgggaagaagacactccatttaaagatccgcgcgagctgtatgattttttaaagacggaaaagcccgaagaggaacttgtcttttcccacggcgacctgggagacagcaacatctttgtgaaagatggcaaagtaagtggctttattgatcttgggagaagcggcagggcggacaagtggtatgacattgccttctgcgtccggtcgatcagggaggatatcggggaagaacagtatgtcgagctattttttgacttactggggatcaagcctgattgggagaaaataaaatattatattttactggatgaattgttttagtacctagatacttcgctcgtgaaaagcagcgctcagggggctagtgcgctcttccgcttcctcgctcactgactcgctgcgctcggtcgt

SEQ ID NO: 102 - DNA, 27300 bp, Artificial Sequence
  Nucleotide sequence of Vector 14
ctcacagaaacaatcaaacaaacatacacagcgatttattcacacgaacccgaattacaacggtatatatcctgtcagccaacaccaaaacatcaaaaaaatcgggatcaggatcaggatctgcggccgcatcctgcaggagctcaaacgagcaggaagcaacgagagggtggcgcgcgaccgacgtgcgtacgtagcatgagcctgagtggagacgttggacgtgtatgtatatacctctctgcgtgttaactatgtacgtaagcggcaggcagtgcaataagtgtggctctgtagtatgtacgtgcgggtacgatgctgtaagctactgaggcaagtccataaataaataatgacacgtgcgtgttctataatctcttcgcttcttcatttgtccccttgcggagtttggcatccattgatgccgttacgctgagaacagacacagcagacgaaccaaaagtgagttcttgtatgaaactatgacccttcatcgctaggctcaaacagcaccccgtacgaacacagcaaattagtcatctaactattagcccctacatgtttcagacgatacataaatatagcccatccttagcaattagctattggccctgcccatcccaagcaatgatctcgaagtatttttaatatatagtatttttaatatgtagcttttaaaattagaagataattttgagacaaaaatctccaagtatttttttgggtattttttactgcctccgtttttctttatttctcgtcacctagtttaattttgtgctaatcggctataaacgaaacagagagaaaagttactctaaaagcaactccaacagattagatataaatcttatatcctgcctagagctgttaaaaagatagacaactttagtggattagtgtatgcaacaaactctccaaatttaagtatcccaactacccaacgcatatcgttcccttttcattggcgcacgaactttcacctgctatagccgacgtacatgttcgttttttttgggcggcgcttactttcttccccgttcgttctcagcatcgcaactcaatttgttatggcggagaagcccttgtatcccaggtagtaatgcacagatatgcattattattattcataaaacgaacgctcttcaactggaagagcggttactaccggttcactagctagctgctaatcgagctagttaccctatgaggtgacatgaagcgctcacggttactatgacggttagcttcacgactgttggtggcagtagcgtacgacttagctatagttccggacttacctagctaggttacctcgagggtgctaagcacgacatccatggcgaccccagtgatggcaactaagtggatcaacagcaacttttgctccgatttgcgatataatttgtcaaaacatgcctctaaaatcactctaacatcaaatttcttgaataacaattttatacactcccctcctccaacttgttatgtgcccttctgacccttcttgttttgtttgctagttaaccatgtaggaaaaagtatcactccactcaatagtattttcacttcatctggccataaataattttggcctaattcagcatcacgtatcaggagtcaataagcttgtctgtccgtctgtatttatcatctctcttcgtgctactatcacctccccttttcttatggatttttcctgttaaaaaacaaaaaggaacaggtaacccacttgaattaggacaccaatgtaggtgccaccacccgtttccttctgttgagtgtgcacgcttattggttcaacctcagaattaaattcttcataatcccctgttgagagaaaattataatagacaaatcaaattgtgtggacttgccatttcccaaaacattttcattttgtgcgcgtgtgggtggtggggtgcgttttattagaatgaagactgtaaaaaagaggagtgtaggatgataagaagtagtaaatgtcagttgtcaaaagatgaaaagcaacggaggaagggaccaaaccttgacctatggaaaactgagtgctatggtaattattgtcacaggatttaggatgattaataatagttcggaccacaaataaacagctttaagaagttcaactttcccccacggatagcaaatttggttggaccatctttgatgaaagtccccaatctcataattgccaaccttttttatacgaaactagtattttcataattatcaagaatcttcaactcatcagtgatcgctcatttctgattaagaaaaaaaaagggtgagtaaatgaatccattttgtctgttctccatggatctcgacccgggtaccctgggatccgatatcgatgggccctggccgaagctttgctctagatcaaactcacatccaaacataacatggatatcttccttaccaatcatactaattattttgggttaaatattaatcattatttttaagatattaattaagaaattaaaagattttttaaaaaaatgtataaaattatattattcatgatttttcatacatttgattttgataataaatatattttttttaatttcttaaaaaatgttgcaagacacttattagacatagtcttgttctgtttacaaaagcattcatcatttaatacattaaaaaatatttaatactaacagtagaatcttcttgtgagtggtgtgggagtaggcaacctggcattgaaacgagagaaagagagtcagaaccagaagacaaataaaaagtatgcaacaaacaaatcaaaatcaaagggcaaaggctggggttggctcaattggttgctacattcaattttcaactcagtcaacggttgagattcactctgacttccccaatctaagccgcggatgcaaacggttgaatctaacccacaatccaatctcgttacttaggggcttttccgtcattaactcacccctgccacccggtttccctataaattggaactcaatgctcccctctaaactcgtatcgcttcagagttgagaccaagacacactcgttcatatatctctctgctcttctcttctcttctacctctcaaggtacttttcttctccctctaccaaatcctagattccgtggttcaatttcggatcttgcacttctggtttgctttgccttgctttttcctcaactgggtccatctaggatccatgtgaaactctactctttctttaatatctgcggaatacgcgtttgactttcagatctagtcgaaatcatttcataattgcctttctttcttttagcttatgagaaataaaatcactttttttttatttcaaaataaaccttgggccttgtgctgactgagatggggtttggtgattacagaattttagcgaattttgtaattgtacttgtttgtctgtagttttgttttgttttcttgtttctcatacattccttaggcttcaattttattcgagtataggtcacaataggaattcaaactttgagcaggggaattaatcccttccttcaaatccagtttgtttgtatatatgtttaaaaaatgaaacttttgctttaaattctattataactttttttatggctgaaatttttgcatgtgtctttgctctctgttgtaaatttactgtttaggtactaactctaggcttgttgtgcagtttttgaagtataaccatgccacacaacacaatggcggccaccgcttccagaaccacccgattctcttcttcctcttcacaccccaccttccccaaacgcattactagatccaccctccctctctctcatcaaaccctcaccaaacccaaccacgctctcaaaatcaaatgttccatctccaaaccccccacggcggcgcccttcaccaaggaagcgccgaccacggagcccttcgtgtcacggttcgcctccggcgaacctcgcaagggcgcggacatccttgtggaggcgctggagaggcagggcgtgacgacggtgttcgcgtaccccggcggtgcgtcgatggagatccaccaggcgctcacgcgctccgccgccatccgcaacgtgctcccgcgccacgagcagggcggcgtcttcgccgccgaaggctacgcgcgttcctccggcctccccggcgtctgcattgccacctccggccccggcgccaccaacctcgtgagcggcctcgccgacgctttaatggacagcgtcccagtcgtcgccatcaccggccaggtcgcccgccggatgatcggcaccgacgccttccaagaaaccccgatcgtggaggtgagcagatccatcacgaagcacaactacctcatcctcgacgtcgacgacatcccccgcgtcgtcgccgaggctttcttcgtcgccacctccggccgccccggtccggtcctcatcgacattcccaaagacgttcagcagcaactcgccgtgcctaattgggacgagcccgttaacctccccggttacctcgccaggctgcccaggccccccgccgaggcccaattggaacacattgtcagactcatcatggaggcccaaaagcccgttctctacgtcggcggtggcagtttgaattccagtgctgaattgaggcgctttgttgaactcactggtattcccgttgctagcactttaatgggtcttggaacttttcctattggtgatgaatattcccttcagatgctgggtatgcatggtactgtttatgctaactatgctgttgacaatagtgatttgttgcttgcctttggggtaaggtttgatgaccgtgttactgggaagcttgaggcttttgctagtagggctaagattgttcacattgatattgattctgccgagattgggaagaacaagcaggcgcacgtgtcggtttgcgcggatttgaagttggccttgaagggaattaatatgattttggaggagaaaggagtggagggtaagtttgatcttggaggttggagagaagagattaatgtgcagaaacacaagtttccattgggttacaagacattccaggacgcgatttctccgcagcatgctatcgaggttcttgatgagttgactaatggagatgctattgttagtactggggttgggcagcatcaaatgtgggctgcgcagttttacaagtacaagagaccgaggcagtggttgacctcagggggtcttggagccatgggttttggattgcctgcggctattggtgctgctgttgctaaccctggggctgttgtggttgacattgatggggatggtagtttcatcatgaatgttcaggagttggccactataagagtggagaatctcccagttaagatattgttgttgaacaatcagcatttgggtatggtggttcagttggaggataggttctacaagtccaatagagctcacacctatcttggagatccgtctagcgagagcgagatattcccaaacatgctcaagtttgctgatgcttgtgggataccggcagcgcgagtgacgaagaaggaagagcttagagcggcaattcagagaatgttggacacccctggcccctaccttcttgatgtcattgtgccccatcaggagcatgtgttgccgatgattcccagtaatggatccttcaaggatgtgataactgagggtgatggtagaacgaggtactgattgcctagaccaaatgttccttgatgcttgttttgtacaatatatataagataatgctgtcctagttgcaggatttggcctgtggtgagcatcatagtctgtagtagttttggtagcaagacattttattttccttttatttaacttactacatgcagtagcatctatctatctctgtagtctgatatctcctgttgtctgtattgtgccgttggattttttgctgtagtgagactgaaaatgatgtgctagtaataatatttctgttagaaatctaagtagagaatctgttgaagaagtcaaaagctaatggaatcaggttacatattcaatgtttttctttttttagcggttggtagacgtgtagattcaacttctcttggagctcacctaggcaatcagtaaaatgcatattccttttttaacttgccatttatttacttttagtggaaattgtgaccaatttgttcatgtagaacggatttggaccattgcgtccacaaaacgtctcttttgctcgatcttcacaaagcgataccgaaatccagagatagttttcaaaagtcagaaatggcaaagttataaatagtaaaacagaatagatgctgtaatcgacttcaataacaagtggcatcacgtttctagttctagacccatcagctggggaattctagtggccggcccagctgatatcatgtcgtgcttagcacgtgatgcatcatagatgcggtaaattattactttctgtgactgggacaatgtgctcctccagtggccacgtatcggtaaaccttgtgccagaacactaatatttatataatcaacaataaagaatggtaagcattagacaaagacaaaaacaatttttaataatttacctgtactaattagaaggggtttgatttaattttattaaacttaacatgtgcaatatgtccctttgtttagaggaaaacaattacggtatttccttactaacgtaaactctgaatataatcatacatctgtattctgaaaaagaaaaaagaactagagataaaagcgtagaaacaacagtatgtggtcatagtcatacacgtaaagggatgaaaattgaaaatagaacctgcaggaaataagtttgcatttaatttggatatatatcttgaagtgtaaggttaacctctcagctattaaatagtactactactaacactcaaatagtacttctactagcactcacggtaacaatctcttagtagggatgggaataggccagatcggcctacaggggtctacgacttgaggtgctaagcacgacatccatggccgggtgtgatttagtataaagtgaagtaatggtcaaaagaaaaagtgtaaaacgaagtacctagtaataagtaatattgaacaaaataaatggtaaagtgtcagatatataaaataggctttaataaaaggaagaaaaaaaacaaacaaaaaataggttgcaatggggcagagcagagtcatcatgaagctagaaaggctaccgatagataaactatagttaattaaatacattaaaaaatacttggatctttctcttaccctgtttatattgagacctgaaacttgagagagatacactaatcttgccttgttgtttcattccctaacttacaggactcagcgcatgtcatgtggtctcgttccccatttaagtcccacaccgtctaaacttattaaattattaatgtttataactagatgcacaacaacaaagcttggtgctaagcacgacatccagttttagagctagaaatagcaagttaaaataaggctagtccgttatcaacttgaaaaagtggcaccgagtcggtgcttttttttcggaccgggttaccagtctaaaaacggcccctaactaacgcttagttgcccgctagattagtcccccgttagtgcctagttagacacacgacgaactaggggctactagtagcggccgcaattggatcgggtttacttattttgtgggtatctatacttttattagatttttaatcaggctcctgatttctttttatttcgattgaattcctgaacttgtattattcagtagatcgaataaattataaaaagataaaatcataaaataatattttatcctatcaatcatattaaagcaatgaatatgtaaaattaatcttatctttattttaaaaaatcatataggtttagtatttttttaaaaataaagataggattagttttactattcactgcttattacttttaaaaaaatcataaaggtttagtatttttttaaaataaatataggaatagttttactattcactgctttaatagaaaaatagtttaaaatttaagatagttttaatcccagcatttgccacgtttgaacgtgagccgaaacgatgtcgttacattatcttaacctagctgaaacgatgtcgtcataatatcgccaaatgccaactggactacgtcgaacccacaaatcccacaaagcgcgtgaaatcaaatcgctcaaaccacaaaaaagaacaacgcgtttgttacacgctcaatcccacgcgagtagagcacagtaaccttcaaataagcgaatggggcataatcagaaatccgaaataaacctaggggcattatcggaaatgaaaagtagctcactcaatataaaaatctaggaaccctagttttcgttatcactctgtgctccctcgctctatttctcagtctctgtgtttgcggctgaggattccgaacgagtgaccttcttcgtttctcgcaaaggtaacagcctctgctcttgtctcttcgattcgatctatgcctgtctcttatttacgatgatgtttcttcggttatgtttttttatttatgctttatgctgttgatgttcggttgtttgtttcgctttgtttttgtggttcagttttttaggattcttttggtttttgaatcgattaatcggaagagattttcgagttatttggtgtgttggaggtgaatcttttttttgaggtcatagatctgttgtatttgtgttataaacatgcgactttgtatgattttttacgaggttatgatgttctggttgttttattatgaatctgttgagacagaaccatgatttttgttgatgttcgtttacactattaaaggtttgttttaacaggattaaaagttttttaagcatgttgaaggagtcttgtagatatgtaaccgtcgatagtttttttgtgggtttgttcacatgttatcaagcttaatcttttactatgtatgcgaccatatctggatccagcaaaggcgattttttaattccttgtgaaacttttgtaatatgaagttgaaattttgttattggtaaactataaatgtgtgaagttggagtatacctttaccttcttatttggctttgtgatagtttaatttatatgtattttgagttctgacttgtatttctttgaattgattctagtttaagtaatccatggcacctaaaaagaagaggaaagttatggacaaaaagtactccatagggctcgatatcggcacaaacagtgtggggtgggcagtcatcactgacgactacaaggtcccctccaagaagttcaaggtcctcggcaatacagaccgccactccatcaagaagaacctcatcggagcactgttgttcgactccggagaaactgccgaagcaaccagactcaagaggaccgccagaagaaggtacacaaggcgcaagaacaggatctgctacctccaggagatcttcagtaacgagatggcaaaggtcgacgactctttcttccacaggctcgaggaatccttcctcgtcgaggaggacaagaagcatgagagacaccccatcttcggaaacatcgtcgacgaggtaagtttctgcttctacctttgatatatatataataattatcattaattagtagtaatataatatttcaaatatttttttcaaaataaaagaatgtagtatatagcaattgcttttctgtagtttataagtgtgtatattttaatttataacttttctaatatatgaccaaaacatggtgatgtgcaggtcgcctaccacgagaagtacccaaccatctaccacctgaggaagaagctcgtcgacagtaccgacaaggctgacctcaggctcatctacctcgcactcgcccacatgattaagttcaggggccacttcctcatagagggagacctcaacccagacaactccgacgtcgacaaactcttcatccaactcgtgcagacctacaatcaactctttgaagagaacccaatcaacgcctccggagtggatgctaaggctatattgtccgccaggctctccaaatcaagacgcctcgaaaacctcatcgcccagctcccaggggagaagaaaaatagcctcttcgggaacctcatagccctgtcccttggactcacccctaacttcaaatcaaatttcgacctcgcagaggacgctaagcttcaactctccaaggacacctacgacgacgacctcgataacctcctcgcccaaatcggtgatcaatacgctgacctcttcctcgctgctaagaacctctccgacgccatactcctctccgacattctgagggtcaacaccgagatcacaaaggctcccttgtccgcctccatgattaaacgctacgacgaacaccaccaggacctcaccctcttgaaggcactggttagacagcagctccccgagaagtacaaggaaatcttcttcgaccaatcaaaaaacggctacgccggatacatcgacggaggagcatcccaggaagagttctacaagttcatcaaaccaattctcgaaaagatggacggaacagaggagctcttggtcaagctcaacagggaggacctcctcagaaagcagagaaccttcgacaacggcagtatcccccaccagatccaccttggagagttgcacgcaatcctcaggaggcaagaggacttctaccccttcctcaaggacaacagggagaagatcgagaagatccttacattccgcatcccctactacgtcggacctttggcaagaggaaactcccgcttcgcatggatgactcgcaagagtgaggaaaccatcaccccttggaacttcgaggaggtcgtcgataagggagcttcagcccagtccttcatcgagcgcatgaccaacttcgataaaaatctccccaatgaaaaagtcctccccaagcacagtctgctctacgagtacttcacagtctacaacgagctcaccaaggtcaagtacgtcaccgaaggcatgagaaaacccgccttcctcagtggcgagcagaagaaggcaatcgtggacttgctgttcaagaccaaccgcaaggtcacagtcaagcaattaaaagaggactacttcaagaaaatagagtgcttcgacagtgtcgagatctctggggtcgaggacaggttcaacgcatccttggggacctatcacgacctcctcaagatcattaaagacaaggacttcctcgacaacgaggagaacgaggacatactggaggacatcgtcctcaccctcactctctttgaggacagggagatgatagaggagcgcctcaaaacctacgcccacctcttcgacgacaaggtgatgaaacagctcaagaggcgcagatacaccggatggggtagactctccaggaagctgattaatggcatccgcgacaaacagtccggcaagaccatcctcgacttcctcaagagtgacggattcgccaaccgcaacttcatgcagctcatacacgacgactccctcaccttcaaggaggacatccaaaaagcccaagtctccggacagggagactcattgcacgaacacatcgccaacttggctggatctcctgctattaaaaagggcatcctccaaaccgtcaaggtggtcgacgaactcgtcaaggtcatgggtagacacaagcccgaaaatatcgtcatcgagatggcaagggagaaccagacaacccagaagggccaaaaaaactccagggagcgcatgaaacgcatcgaggagggaataaaggagctcgggtcccagatcctcaaggagcaccccgtcgaaaatactcaactccagaatgaaaagctctacctctactacctccaaaacggcagggatatgtacgtcgaccaagagctcgacattaatcgcctctccgactacgacgtcgatcacatcgtcccccagagtttcctcaaggacgactccatcgacaacaaggtcctcaccagatccgataaaaatcgcggaaagtccgacaacgtcccctctgaggaagtggttaagaagatgaaaaactactggagacagctcctcaacgcaaagctgatcacccagcgcaagttcgacaacctcacaaaggctgagagagggggactctctgagttggacaaggccggcttcatcaagagacaactcgtggaaacccgccagatcaccaagcatgtcgcacagattctcgactcccgcatgaatactaaatacgatgaaaatgacaagctcatcagggaggtcaaggtcatcaccctgaagtccaagctcgtctccgacttccgcaaggacttccagttctacaaggtccgcgagatcaacaactaccaccacgcccacgacgcatacctcaacgctgtggttggaacagcactcatcaagaagtaccccaagctcgagtccgagttcgtctacggcgactacaaggtctacgacgtcaggaagatgatcgccaagtccgagcaagagatcggaaaggccaccgcaaaatatttcttctactccaacataatgaacttcttcaaaaccgagatcaccctggctaacggagaaataaggaagaggcccctgatagaaaccaacggcgagacaggcgagattgtctgggacaaaggcagggacttcgcaaccgtcagaaaggtgctcagtatgcctcaggtcaacatagtcaaaaagaccgaagtccagactggaggattctccaaggagtccatcctccccaaaaggaactccgacaaactgatcgccaggaaaaaggactgggaccccaaaaaatatggcggcttcgactcccctactgttgcttacagtgtgctcgtcgtcgcaaaagtcgagaaggggaaatccaagaagctcaagtcagtgaaggagctcctcggcatcaccatcatggagaggtcctccttcgagaagaaccccatcgacttcctcgaggccaagggatataaggaggtcaagaaggacctcatcattaaactccccaagtactccctcttcgagctcgaaaacggacgcaagaggatgctcgcttcagctggtgaactccagaagggcaacgaactcgctttgccctctaaatacgtcaacttcctctacctcgcctcccactatgaaaagctcaagggctccccagaggacaacgagcagaagcaactcttcgtcgagcagcacaagcattacctcgacgagatcatcgagcagatctccgagttctccaagagagtcatcctcgctgacgcaaacctcgacaaggtcctcagtgcatataacaagcaccgcgacaaaccaataagggagcaggccgaaaatattatacacctgttcaccctcaccaacttgggagcaccagccgccttcaagtatttcgacaccaccatcgacagaaagcgctacacctccacaaaggaggtcctggacgccacacttatccaccagtccatcaccggcctctatgaaacacgcatcgacctctctcaattgggaggggacaagagaccaagagacagacacgatggagagcttggaggtagaaagagagcaaggtagttcgaactggccaggtaccgttaacctagacttgtccatcttctggattggccaacttaattaatgtatgaaataaaaggatgcacacatagtgacatgctaatcactataatgtgggcatcaaagttgtgtgttatgtgtaattactagttatctgaataaaagagaaagagatcatccatatttcttatcctaaatgaatgtcacgtgtctttataattctttgatgaaccagatgcatttcattaaccaaatccatatacatataaatattaatcatatataattaatatcaattgggttagcaaaacaaatctagtctaggtgtgttttgcaagcttggcgcgccgttaacttaacggcaaacgctaattagtcactaggcccaggaaacactaactaagccctagcttatcctagcgcaacctagttaggtcttggtaacccgagatatcgatgcggccgccgctccgggtgattgcggttacatcatgtacggaaaaataattctaatccttgatttaaatttgaacttgactatttatttattctttatttcattttgtaaatcattttatgtatctcctggcaagcaattttatccaccttgcaccaacaccttcgggttccataatcaaaccaccttaacttcacaccatgctgtaactcacaccgcccagcatctccaatgtgaaagaagctaaaatttaataaacaatcatacgaagcagtgacaaaataccagatggtattaatgcttcgataaaattaattggaaagtataaaatggtagaaaataataaattataattaatttaagtaagataaaaaataattaaaaactaaaatgttaaaattttaaaaaaattattttaaataatatttaaaaacattaaaaatcattttaaaaaatttatttatagaacaattaaataaatatttcagctaataaaaaacaaaagcttacctagccttagaagacaacttgtccaacaattagatgatacccattgcccttacgttttctttaacatcaattattgtttttgtcaacaagctatcttttagttttattttattggtaaaaaatatgtcgccttcaagttgcatcatttaacacatctcgtcattagaaaaataaaactcttccctaaacgattagtagaaaaaatcattcgataataaataagaaagaaaaattagaaaaaaataacttcattttaaaaaaatcattaaggctatattttttaaatgactaattttatatagactgtaactaaaagtatacaatttattatgctatgtatcttaaagaattacttataaaaatctacggaagaatatcttacaaagtgaaaaacaaatgagaaagaatttagtgggatgattatgattttatttgaaaattgaaaaaataattattaaagactttagtggagtaagaaagctttcctattagtcttttcttatccataaaaaaaaaaaaaaaaatctagcgtgacagcttttccatagattttaataatgtaaaatactggtagcagccgaccgttcaggtaatggacactgtggtcctaacttgcaacgggtgcgggcccaatttaataacgccgtggtaacggataaagccaagcgtgaagcggtgaaggtacatctctgactccgtcaagattacgaaaccgtcaactacgaaggactccccgaaatatcatctgtgtcataaacaccaagtcacaccatacatgggcacgcgtcacaatatgattggagaacggttccaccgcatatgctataaaatgcccccacacccctcgaccctaatcgcacttcaattgcaatcaaattagttcattctctttgcgcagttccctacctctcctttcaaggttcgtagatttcttccgtttttttttcttcttctttattgtttgttctacatcagcatgatgttgatttgattgtgttttctatcgtttcatcgattataaattttcataatcagaagattcagcttttattaatgcaagaacgtccttaattgatgattttataaccgtaaattaggtctaattagagtttttttcataaagattttcagatccgtttacaacaagccttaattgttgattctgtagtcgtagattaaggtttttttcatgaactacttcagatccgttaaacaacagccttatttgttgatacttcagtcgtttttcaagaaattgttcagatccgttgataaaagccttattcgttgattctgtatggtatttcaagagatattgctcaggtcctttagcaactaccttatttgttgattctgtggccatagattaggattttttttcacgaaattgcttcttgaaattacgtgatggattttgattctgatttatcttgtgattgttgactctacagccatggcccacagcaagcacggcctgaaggaggagatgaccatgaagtaccacatggagggctgcgtgaacggccacaagttcgtgatcaccggcgagggcatcggctaccccttcaagggcaagcagaccatcaacctgtgcgtgatcgagggcggccccctgcccttcagcgaggacatcctgagcgccggcttcaagtacggcgaccggatcttcaccgagtacccccaggacatcgtggactacttcaagaacagctgccccgccggctacacctggggccggagcttcctgttcgaggacggcgccgtgtgcatctgtaacgtggacatcaccgtgagcgtgaaggagaactgcatctaccacaagagcatcttcaacggcgtgaacttccccgccgacggccccgtgatgaagaagatgaccaccaactgggaggccagctgcgagaagatcatgcccgtgcctaagcagggcatcctgaagggcgacgtgagcatgtacctgctgctgaaggacggcggccggtaccggtgccagttcgacaccgtgtacaaggccaagagcgtgcccagcaagatgcccgagtggcacttcatccagcacaagctgctgcgggaggaccggagcgacgccaagaaccagaagtggcagctgaccgagcacgccatcgccttccccagcgccctggcctgagagctcgaatttccccgatcgttcaaacatttggcaataaagtttcttaagattgaatcctgttgccggtcttgcgatgattatcatataatttctgttgaattacgttaagcatgtaataattaacatgtaatgcatgacgttatttatgagatgggtttttatgattagagtcccgcaattatacatttaatacgcgatagaaaacaaaatatagcgcgcaaactaggataaattatcgcgcgcggtgtcatctatgttactagatcgggaattctagtggccggcccagctgatatctagacccagctttcttgtacaaagtggcccggggcggccgaagctggccttctaggcccggaccgggtgaccaagcttggcgcgcccagggcccatcgatatcggtacctacgcgttcgaatatccatggatccgaattccgcggccgcttggtaacccggtccgggccattctggccgatccgttaacgcccgggcaactttattatacaaagttgatggtacggatccgtcgacggcgcgccgcggacctgaattccagcacactggcggccgttactagtaacggccgccagtgtgctggaattcgcccttcccaagctttgctctagatcaaactcacatccaaacataacatggatatcttccttaccaatcatactaattattttgggttaaatattaatcattatttttaagatattaattaataagtgactagggtcacgtgaccctagtcacttatgattccgatgacttcgtaggttcctagctcaagccgctcgtgtccaagcgtcacttacgattagctaatgattacggcatctaggaccgactagttcttatgtgcttctagtctccaaatgtggttgatagttattttgctctaagatcaacagtaatgaagtataaatcatcgttgtggtgtgctactcggttaattgagcattaacacacacaaacatgacgaggatggtataatctccaaaaatgtgtactttgttaggtgggaccctatagccttgattaatgtgctatgttaggcatgcctggaaacgtgtgacgcatatgttttgtgaacctgttgatattatatgtgcttttatattaccatattttattaaaatactaatatttattactagtaagatataacattctatctagcttaaaaactaaccataaatattccataataactagatttaccaaactaatatactaaatatacataataaatacaaaattaacaagacaataatcaatatttatgagcttaatatatttagacattatggttggtcgacgataatcatgctaacttttcgtaattgcttgattgaaatatgcttagaataatgcctctttgttctacatggcaaatagggaccattatggtgtaacaccctgggaaccacaaacaccccgaaatgctactaaactacacaactaaccttcatatataaaatttcgacagcatctcctttgaaaatttgcatagacgtggaagcaacagagtataaacagatctagctagctaagtttaaacggccggccaaacgtgcaagcgctactagacaattcagtacattaaaaacgtccgcaatgtgttattaagttgtctaagcgtcaatttatttacaattgaatatatcctgccaccagccagccaacagctccccgaccggcagctcggcacaaaatcaccactcgatacaggcagcccatcagtccgggacggcgtcagcgggagagccgttgtaaggcggcagactttgctcatgttaccgatgctattcggaagaacggcaactaagctgccgggtttgaaacacggatgatctcgcggagggtagcatgttgattgtaacgatgacagagcgttgctgcctgtgatcaaatatcatctccctcgcagagatccgaattatcagccttcttattcatttctcgcttaaccgtgacaggcgcgcgcggtgccacctgggtccttttcatcacgtgctataaaaataattataatttaaattttttaatataaatatataaattaaaaatagaaagtaaaaaaagaaattaaagaaaaaatagtttttgttttccgaagatgtaaaagactctagggggatcgccaacaaatactaccttttatcttgctcttcctgctctcaggtattaatgccgaattgtttcatcttgtctgtgtagaagaccacacacgaaaatcctgtgattttacattttacttatcgttaatcgaatgtatatctatttaatctgcttttcttgtctaataaatatatatgtaaagtacgctttttgttgaaattttttaaacctttgtttatttttttttcttcattccgtaactcttctaccttctttatttactttctaaaatccaaatacaaaacataaaaataaataaacacagagtaaattcccaaattattccatcattaaaagatacgaggcgcgtgtaagttacaggcaagcgatccgtcctaagaaaccattattatcatgacattaacctataaaaataggcgtatcacgaggccctttcgtctcgcgcgtttcggtgatgacggtgaaaacctctgacacatgcagctcccggagacggtcacagcttgtctgtaagcggatgccgggagcagacaagcccgtcagggcgcgtcagcgggtgttggcgggtgtcggggctggcttaactatgcggcatcagagcagattgtactgagagtgcaccataccacagcttttcaattcaattcatcattttttttttattcttttttttgatttcggtttctttgaaatttttttgattcggtaatctccgaacagaaggaagaacgaaggaaggagcacagacttagattggtatatatacgcatatgtagtgttgaagaaacatgaaattgcccagtattcttaacccaactgcacagaacaaaaacctgcaggaaacgaagataaatcatgtcgaaagctacatataaggaacgtgctgctactcatcctagtcctgttgctgccaagctatttaatatcatgcacgaaaagcaaacaaacttgtgtgcttcattggatgttcgtaccaccaaggaattactggagttagttgaagcattaggtcccaaaatttgtttactaaaaacacatgtggatatcttgactgatttttccatggagggcacagttaagccgctaaaggcattatccgccaagtacaattttttactcttcgaagacagaaaatttgctgacattggtaatacagtcaaattgcagtactctgcgggtgtatacagaatagcagaatgggcagacattacgaatgcacacggtgtggtgggcccaggtattgttagcggtttgaagcaggcggcagaagaagtaacaaaggaacctagaggccttttgatgttagcagaattgtcatgcaagggctccctatctactggagaatatactaagggtactgttgacattgcgaagagcgacaaagattttgttatcggctttattgctcaaagagacatgggtggaagagatgaaggttacgattggttgattatgacacccggtgtgggtttagatgacaagggagacgcattgggtcaacagtatagaaccgtggatgatgtggtctctacaggatctgacattattattgttggaagaggactatttgcaaagggaagggatgctaaggtagagggtgaacgttacagaaaagcaggctgggaagcatatttgagaagatgcggccagcaaaactaaaaaactgtattataagtaaacgcgcgcgggcgcgccttttcagcctgatacagattaaatcagaacgcagaagcggtctgataaaacagaatttgcctggcggcagtagcgcggtggtcccacctgaccccatgccgaactcagaagtgaaacgccgtagcgccgatggtagtgtggggtctccccatgcgagagtagggaactgccaggcatcaaataaaacgaaaggctcagtcgaaagactgggcctttcgttttatctgttgtttgtcggtgaacgctctcctgagtaggacaaatccgccgggagcggatttgaacgttgcgaagcaacggcccggagggtggcgggcaggacgcccgccataaactgccaggcatcaaattaagcagaaggccatcctgacggatggcctttttgcgtttctacaaactcttaccgcacccggagcgggcgcgaggccgccaaggcccgaggcgtgaagtttggcccccgccctaccctcaccccggcacagatcgcgcacgcccgcgagctgatcgaccaggaaggccgcaccgtgaaagaggcggctgcactgcttggcgtgcatcgctcgaccctgtaccgcgcacttgagcgcagcgaggaagtgacgcccaccgaggccaggcggcgcggtgccttccgtgaggacgcattgaccgaggccgacgccctggcggccgccgagaatgaacgccaagaggaacaagcatgaaaccgcaccaggacggccaggacgaaccgtttttcattaccgaagagatcgaggcggagatgatcgcggccgggtacgtgttcgagccgcccgcgcacgtctcaaccgtgcggctgcatgaaatcctggccggtttgtctgatgccaagctggcggcctggccggccagcttggccgctgaagaaaccgagcgccgccgtctaaaaaggtgatgtgtatttgagtaaaacagcttgcgtcatgcggtcgctgcgtatatgatgcgatgagtaaataaacaaatacgcaaggggaacgcatgaaggttatcgctgtacttaaccagaaaggcgggtcaggcaagacgaccatcgcaacccatctagcccgcgccctgcaactcgccggggccgatgttctgttagtcgattccgatccccagggcagtgcccgcgattgggcggccgtgcgggaagatcaaccgctaaccgttgtcggcatcgaccgcccgacgattgaccgcgacgtgaaggccatcggccggcgcgacttcgtagtgatcgacggagcgccccaggcggcggacttggctgtgtccgcgatcaaggcagccgacttcgtgctgattccggtgcagccaagcccttacgacatatgggccaccgccgacctggtggagctggttaagcagcgcattgaggtcacggatggaaggctacaagcggcctttgtcgtgtcgcgggcgatcaaaggcacgcgcatcggcggtgaggttgccgaggcgctggccgggtacgagctgcccattcttgagtcccgtatcacgcagcgcgtgagctacccaggcactgccgccgccggcacaaccgttcttgaatcagaacccgagggcgacgctgcccgcgaggtccaggcgctggccgctgaaattaaatcaaaactcatttgagttaatgaggtaaagagaaaatgagcaaaagcacaaacacgctaagtgccggccgtccgagcgcacgcagcagcaaggctgcaacgttggccagcctcgcagacacgccagccatgaagcgggtcaactttcagttgccggcggaggatcacaccaagctgaagatgtacgcggtacgccaaggcaagaccattaccgagctgctatctgaatacatcgcgcagctaccagagtaaatgagcaaatgaataaatgagtagatgaattttagcggctaaaggaggcggcatggaaaatcaagaacaaccaggcaccgacgccgtggaatgccccatgtgtggaggaacgggcggttggccaggcgtaagcggctgggttgcctgccggccctgcaatggcactggaacccccaagcccgaggaatcggcgtgagcggtcgcaaaccatccggcccggtacaaatcggcgcggcgctgggtgatgacctggtggagaagttgaaggcagcgcaggccgcccagcggcaacgcatcgaggcagaagcacgccccggtgaatcgtggcaagcagccgctgatcgaatccgcaaagaatcccggcaaccgccggcagccggtgcgccgtcgattaggaagccgcccaagggcgacgagcaaccagattttttcgttccgatgctctatgacgtgggcacccgcgatagtcgcagcatcatggacgtggccgttttccgtctgtcgaagcgtgaccgacgagctggcgaggtgatccgctacgagcttccagacgggcacgtagaggtttccgcagggccggcaggcatggccagtgtgtgggattacgacctggtactgatggcggtttcccatctaaccgaatccatgaaccgataccgggaagggaagggagacaagcccggccgcgtgttccgtccacacgttgcggacgtactcaagttctgccggcgagccgatggcggaaagcagaaagacgacctggtagaaacctgcattcggttaaacaccacgcacgttgccatgcagcgtacgaagaaggccaagaacggccgcctggtgacggtatccgagggtgaagccttgattagccgctacaagatcgtaaagagcgaaaccgggcggccggagtacatcgagatcgagctagctgattggatgtaccgcgagatcacagaaggcaagaacccggacgtgctgacggttcaccccgattactttttgatcgatcccggcatcggccgttttctctaccgcctggcacgccgcgccgcaggcaaggcagaagccagatggttgttcaagacgatctacgaacgcagtggcagcgccggagagttcaagaagttctgtttcaccgtgcgcaagctgatcgggtcaaatgacctgccggagtacgatttgaaggaggaggcggggcaggctggcccgatcctagtcatgcgctaccgcaacctgatcgagggcgaagcatccgccggttcctaatgtacggagcagatgctagggcaaattgccctagcaggggaaaaaggtcgaaaaggtctctttcctgtggatagcacgtacattgggaacccaaagccgtacattgggaaccggaacccgtacattgggaacccaaagccgtacattgggaaccggtcacacatgtaagtgactgatataaaagagaaaaaaggcgatttttccgcctaaaactctttaaaacttattaaaactcttaaaacccgcctggcctgtgcataactgtctggccagcgcacagccgaagagctgcaaaaagcgcctacccttcggtcgctgcgctccctacgccccgccgcttcgcgtcggcctatggcgcgccggaaaatatgcatggcatgcccgttccatacagaagctgggcgaacaaacgatgctcgccttccagaaaaccgaggatgcgaaccacttcatccggggtcagcaccaccggcaagcgccgcgacggccgaggtcttccgatctcctgaagccagggcagatccgtgcacagcaccttgccgtagaagaacagcaaggccgccaatgcctgacgatgcgtggagaccgaaaccttgcgctcgttcgccagccaggacagaaatgcctcgacttcgctgctgcccaaggttgccgggtgacgcacaccgtggaaacggatgaaggcacgaacccagtggacataagcctgttcggttcgtaagctgtaatgcaagtagcgtatgcgctcacgcaactggtccagaaccttgaccgaacgcagcggtggtaacggcgcagtggcggttttcatggcttgttatgactgtttttttggggtacagtctatgcctcgggcatccaagcagcaagcgcgttacgccgtgggtcgatgtttgatgttatggagcagcaacgatgttacgcagcagggcagtcgccctaaaacaaagttaaacatcatgagggaagcggtgatcgccgaagtatcgactcaactatcagaggtagttggcgtcatcgagcgccatctcgaaccgacgttgctggccgtacatttgtacggctccgcagtggatggcggcctgaagccacacagtgatattgatttgctggttacggtgacggtaaggcttgatgaaacaacgcggcgagctttgatcaacgaccttttggaaacttcggcttcccctggagagagcgagattctccgcgctgtagaagtcaccattgttgtgcacgacgacatcattccgtggcgttatccagctaagcgcgaactgcaatttggagaatggcagcgcaatgacattcttgcaggtatcttcgagccagccacgatcgacattgatctggctatcttgctgacaaaagcaagagaacatagcgttgccttggtaggtccagcggcggaggaactctttgatccggttcctgaacaggatctatttgaggcgctaaatgaaaccttaacgctatggaactcgccgcccgactgggctggcgatgagcgaaatgtagtgcttacgttgtcccgcatttggtacagcgcagtaaccggcaaaatcgcgccgaaggatgtcgctgccgactgggcaatggagcgcctgccggcccagtatcagcccgtcatacttgaagctagacaggcttatcttggacaagaagaagatcgcttggcctcgcgcgcagatcagttggaagaatttgtccactacgtgaaaggcgagatcaccaaggtagtcggcaaataatgtctaacaattcgttcaagccgacgccgcttcgcggcgcggcttaactcaagcgttagatgcactatacgtaaccaactagtaggaacagtgaattggagttcgtcttgttataattagcttcttgggggatctttaaatactgtagaaaagaggaaggaaataataaatggctaaaatgagaatatcaccggaattgaaaaaactgatcgaaaaataccgctgcgtaaaagatacggaaggaatgtctcctgctaaggtatataagctggtgggagaaaatgaaaacctatatttaaaaatgacggacagccggtataaagggaccacctatgatgtggaacgggaaaaggacatgatgctatggctggaaggaaagctgcctgttccaaaggtcctgcactttgaacggcatgatggctggagcaatctgctcatgagtgaggccgatggcgtcctttgctcggaagagtatgaagatgaacaaagccctgaaaagattatcgagctgtatgcggagtgcatcaggctctttcactccatcgacatatcggattgtccctatacgaatagcttagacagccgcttagccgaattggattacttactgaataacgatctggccgatgtggattgcgaaaactgggaagaagacactccatttaaagatccgcgcgagctgtatgattttttaaagacggaaaagcccgaagaggaacttgtcttttcccacggcgacctgggagacagcaacatctttgtgaaagatggcaaagtaagtggctttattgatcttgggagaagcggcagggcggacaagtggtatgacattgccttctgcgtccggtcgatcagggaggatatcggggaagaacagtatgtcgagctattttttgacttactggggatcaagcctgattgggagaaaataaaatattatattttactggatgaattgttttagtacctagatacttcgctcgtgaaaagcagcgctcagggggctagtgcgctcttccgcttcctcgctcactgactcgctgcgctcggtcgttcggctgcggcgagcggtatcagctcactcaaaggcggtaatacggttatccacagaatcaggggataacgcaggaaagaacatgtgagcaaaaggccagcaaaaggccaggaaccgtaaaaaggccgcgttgctggcgtttttccataggctccgcccccctgacgagcatcacaaaaatcgacgctcaagtcagaggtggcgaaacccgacaggactataaagataccaggcgtttccccctggaagctccctcgtgcgctctcctgttccgaccctgccgcttaccggatacctgtccgcctttctcccttcgggaagcgtggcgctttctcatagctcacgctgtaggtatctcagttcggtgtaggtcgttcgctccaagctgggctgtgtgcacgaaccccccgttcagcccgaccgctgcgccttatccggtaactatcgtcttgagtccaacccggtaagacacgacttatcgccactggcagcagccactggtaacaggattagcagagcgaggtatgtaggcggtgctacagagttcttgaagtggtggcctaactacggctacactagaagaacagtatttggtatctgcgctctgctgaagccagttaccttcggaaaaagagttggtagctcttgatccggcaaacaaaccaccgctggtagcggtggtttttttgtttgcaagcagcagattacgcgcagaaaaaaaggatctcaagaagatcctttgatcttttctacggggtctgacgctcagtggaacgaaaactcacgttaagggattttggtcatgagattatcaaaaaggatcttcacctagatccttttaaattaaaaatgaagcgtacgttggaatcgcttctacaaaa

SEQ ID NO: 103 - DNA, 26875 bp, Artificial Sequence
  Nucleotide sequence of Vector 15
ctcacagaaacaatcaaacaaacatacacagcgatttattcacacgaacccgaattacaacggtatatatcctgtcagccaacaccaaaacatcaaaaaaatcgggatcaggatcaggatctgcggccgcatcctgcaggagctcaaacgagcaggaagcaacgagagggtggcgcgcgaccgacgtgcgtacgtagcatgagcctgagtggagacgttggacgtgtatgtatatacctctctgcgtgttaactatgtacgtaagcggcaggcagtgcaataagtgtggctctgtagtatgtacgtgcgggtacgatgctgtaagctactgaggcaagtccataaataaataatgacacgtgcgtgttctataatctcttcgcttcttcatttgtccccttgcggagtttggcatccattgatgccgttacgctgagaacagacacagcagacgaaccaaaagtgagttcttgtatgaaactatgacccttcatcgctaggctcaaacagcaccccgtacgaacacagcaaattagtcatctaactattagcccctacatgtttcagacgatacataaatatagcccatccttagcaattagctattggccctgcccatcccaagcaatgatctcgaagtatttttaatatatagtatttttaatatgtagcttttaaaattagaagataattttgagacaaaaatctccaagtatttttttgggtattttttactgcctccgtttttctttatttctcgtcacctagtttaattttgtgctaatcggctataaacgaaacagagagaaaagttactctaaaagcaactccaacagattagatataaatcttatatcctgcctagagctgttaaaaagatagacaactttagtggattagtgtatgcaacaaactctccaaatttaagtatcccaactacccaacgcatatcgttcccttttcattggcgcacgaactttcacctgctatagccgacgtacatgttcgttttttttgggcggcgcttactttcttccccgttcgttctcagcatcgcaactcaatttgttatggcggagaagcccttgtatcccaggtagtaatgcacagatatgcattattattattcataaaacgaacgctcttcaactggaagagcggttactaccggttcactagctagctgctaatcgagctagttaccctatgaggtgacatgaagcgctcacggttactatgacggttagcttcacgactgttggtggcagtagcgtacgacttagctatagttccggacttacctagctaggttacctcgagggtgctaagcacgacatccatggcgaccccagtgatggcaactaagtggatcaacagcaacttttgctccgatttgcgatataatttgtcaaaacatgcctctaaaatcactctaacatcaaatttcttgaataacaattttatacactcccctcctccaacttgttatgtgcccttctgacccttcttgttttgtttgctagttaaccatgtaggaaaaagtatcactccactcaatagtattttcacttcatctggccataaataattttggcctaattcagcatcacgtatcaggagtcaataagcttgtctgtccgtctgtatttatcatctctcttcgtgctactatcacctccccttttcttatggatttttcctgttaaaaaacaaaaaggaacaggtaacccacttgaattaggacaccaatgtaggtgccaccacccgtttccttctgttgagtgtgcacgcttattggttcaacctcagaattaaattcttcataatcccctgttgagagaaaattataatagacaaatcaaattgtgtggacttgccatttcccaaaacattttcattttgtgcgcgtgtgggtggtggggtgcgttttattagaatgaagactgtaaaaaagaggagtgtaggatgataagaagtagtaaatgtcagttgtcaaaagatgaaaagcaacggaggaagggaccaaaccttgacctatggaaaactgagtgctatggtaattattgtcacaggatttaggatgattaataatagttcggaccacaaataaacagctttaagaagttcaactttcccccacggatagcaaatttggttggaccatctttgatgaaagtccccaatctcataattgccaaccttttttatacgaaactagtattttcataattatcaagaatcttcaactcatcagtgatcgctcatttctgattaagaaaaaaaaagggtgagtaaatgaatccattttgtctgttctccatggatctcgacccgggtgattgcggttacatcatgtacggaaaaataattctaatccttgatttaaatttgaacttgactatttatttattctttatttcattttgtaaatcattttatgtatctcctggcaagcaattttatccaccttgcaccaacaccttcgggttccataatcaaaccaccttaacttcacaccatgctgtaactcacaccgcccagcatctccaatgtgaaagaagctaaaatttaataaacaatcatacgaagcagtgacaaaataccagatggtattaatgcttcgataaaattaattggaaagtataaaatggtagaaaataataaattataattaatttaagtaagataaaaaataattaaaaactaaaatgttaaaattttaaaaaaattattttaaataatatttaaaaacattaaaaatcattttaaaaaatttatttatagaacaattaaataaatatttcagctaataaaaaacaaaagcttacctagccttagaagacaacttgtccaacaattagatgatacccattgcccttacgttttctttaacatcaattattgtttttgtcaacaagctatcttttagttttattttattggtaaaaaatatgtcgccttcaagttgcatcatttaacacatctcgtcattagaaaaataaaactcttccctaaacgattagtagaaaaaatcattcgataataaataagaaagaaaaattagaaaaaaataacttcattttaaaaaaatcattaaggctatattttttaaatgactaattttatatagactgtaactaaaagtatacaatttattatgctatgtatcttaaagaattacttataaaaatctacggaagaatatcttacaaagtgaaaaacaaatgagaaagaatttagtgggatgattatgattttatttgaaaattgaaaaaataattattaaagactttagtggagtaagaaagctttcctattagtcttttcttatccataaaaaaaaaaaaaaaaatctagcgtgacagcttttccatagattttaataatgtaaaatactggtagcagccgaccgttcaggtaatggacactgtggtcctaacttgcaacgggtgcgggcccaatttaataacgccgtggtaacggataaagccaagcgtgaagcggtgaaggtacatctctgactccgtcaagattacgaaaccgtcaactacgaaggactccccgaaatatcatctgtgtcataaacaccaagtcacaccatacatgggcacgcgtcacaatatgattggagaacggttccaccgcatatgctataaaatgcccccacacccctcgaccctaatcgcacttcaattgcaatcaaattagttcattctctttgcgcagttccctacctctcctttcaaggttcgtagatttcttccgtttttttttcttcttctttattgtttgttctacatcagcatgatgttgatttgattgtgttttctatcgtttcatcgattataaattttcataatcagaagattcagcttttattaatgcaagaacgtccttaattgatgattttataaccgtaaattaggtctaattagagtttttttcataaagattttcagatccgtttacaacaagccttaattgttgattctgtagtcgtagattaaggtttttttcatgaactacttcagatccgttaaacaacagccttatttgttgatacttcagtcgtttttcaagaaattgttcagatccgttgataaaagccttattcgttgattctgtatggtatttcaagagatattgctcaggtcctttagcaactaccttatttgttgattctgtggccatagattaggattttttttcacgaaattgcttcttgaaattacgtgatggattttgattctgatttatcttgtgattgttgactctacagccatggcccacagcaagcacggcctgaaggaggagatgaccatgaagtaccacatggagggctgcgtgaacggccacaagttcgtgatcaccggcgagggcatcggctaccccttcaagggcaagcagaccatcaacctgtgcgtgatcgagggcggccccctgcccttcagcgaggacatcctgagcgccggcttcaagtacggcgaccggatcttcaccgagtacccccaggacatcgtggactacttcaagaacagctgccccgccggctacacctggggccggagcttcctgttcgaggacggcgccgtgtgcatctgtaacgtggacatcaccgtgagcgtgaaggagaactgcatctaccacaagagcatcttcaacggcgtgaacttccccgccgacggccccgtgatgaagaagatgaccaccaactgggaggccagctgcgagaagatcatgcccgtgcctaagcagggcatcctgaagggcgacgtgagcatgtacctgctgctgaaggacggcggccggtaccggtgccagttcgacaccgtgtacaaggccaagagcgtgcccagcaagatgcccgagtggcacttcatccagcacaagctgctgcgggaggaccggagcgacgccaagaaccagaagtggcagctgaccgagcacgccatcgccttccccagcgccctggcctgagagctcgaatttccccgatcgttcaaacatttggcaataaagtttcttaagattgaatcctgttgccggtcttgcgatgattatcatataatttctgttgaattacgttaagcatgtaataattaacatgtaatgcatgacgttatttatgagatgggtttttatgattagagtcccgcaattatacatttaatacgcgatagaaaacaaaatatagcgcgcaaactaggataaattatcgcgcgcggtgtcatctatgttactagatcgggaattctagtggccggcccagctgatatcatgtcgtgcttagcacgtgatgcatcatagatgcggtaaattattactttctgtgactgggacaatgtgctcctccagtggccacgtatcggtaaaccttgtgccagaacactaatatttatataatcaacaataaagaatggtaagcattagacaaagacaaaaacaatttttaataatttacctgtactaattagaaggggtttgatttaattttattaaacttaacatgtgcaatatgtccctttgtttagaggaaaacaattacggtatttccttactaacgtaaactctgaatataatcatacatctgtattctgaaaaagaaaaaagaactagagataaaagcgtagaaacaacagtatgtggtcatagtcatacacgtaaagggatgaaaattgaaaatagaacctgcaggaaataagtttgcatttaatttggatatatatcttgaagtgtaaggttaacctctcagctattaaatagtactactactaacactcaaatagtacttctactagcactcacggtaacaatctcttagtagggatgggaataggccagatcggcctacaggggtctacgacttgaggtgctaagcacgacatccatggccgggtgtgatttagtataaagtgaagtaatggtcaaaagaaaaagtgtaaaacgaagtacctagtaataagtaatattgaacaaaataaatggtaaagtgtcagatatataaaataggctttaataaaaggaagaaaaaaaacaaacaaaaaataggttgcaatggggcagagcagagtcatcatgaagctagaaaggctaccgatagataaactatagttaattaaatacattaaaaaatacttggatctttctcttaccctgtttatattgagacctgaaacttgagagagatacactaatcttgccttgttgtttcattccctaacttacaggactcagcgcatgtcatgtggtctcgttccccatttaagtcccacaccgtctaaacttattaaattattaatgtttataactagatgcacaacaacaaagcttggtgctaagcacgacatccagttttagagctagaaatagcaagttaaaataaggctagtccgttatcaacttgaaaaagtggcaccgagtcggtgcttttttttcggaccgggttaccagtctaaaaacggcccctaactaacgcttagttgcccgctagattagtcccccgttagtgcctagttagacacacgacgaactaggggctactagtagcggccgcaattggatcgggtttacttattttgtgggtatctatacttttattagatttttaatcaggctcctgatttctttttatttcgattgaattcctgaacttgtattattcagtagatcgaataaattataaaaagataaaatcataaaataatattttatcctatcaatcatattaaagcaatgaatatgtaaaattaatcttatctttattttaaaaaatcatataggtttagtatttttttaaaaataaagataggattagttttactattcactgcttattacttttaaaaaaatcataaaggtttagtatttttttaaaataaatataggaatagttttactattcactgctttaatagaaaaatagtttaaaatttaagatagttttaatcccagcatttgccacgtttgaacgtgagccgaaacgatgtcgttacattatcttaacctagctgaaacgatgtcgtcataatatcgccaaatgccaactggactacgtcgaacccacaaatcccacaaagcgcgtgaaatcaaatcgctcaaaccacaaaaaagaacaacgcgtttgttacacgctcaatcccacgcgagtagagcacagtaaccttcaaataagcgaatggggcataatcagaaatccgaaataaacctaggggcattatcggaaatgaaaagtagctcactcaatataaaaatctaggaaccctagttttcgttatcactctgtgctccctcgctctatttctcagtctctgtgtttgcggctgaggattccgaacgagtgaccttcttcgtttctcgcaaaggtaacagcctctgctcttgtctcttcgattcgatctatgcctgtctcttatttacgatgatgtttcttcggttatgtttttttatttatgctttatgctgttgatgttcggttgtttgtttcgctttgtttttgtggttcagttttttaggattcttttggtttttgaatcgattaatcggaagagattttcgagttatttggtgtgttggaggtgaatcttttttttgaggtcatagatctgttgtatttgtgttataaacatgcgactttgtatgattttttacgaggttatgatgttctggttgttttattatgaatctgttgagacagaaccatgatttttgttgatgttcgtttacactattaaaggtttgttttaacaggattaaaagttttttaagcatgttgaaggagtcttgtagatatgtaaccgtcgatagtttttttgtgggtttgttcacatgttatcaagcttaatcttttactatgtatgcgaccatatctggatccagcaaaggcgattttttaattccttgtgaaacttttgtaatatgaagttgaaattttgttattggtaaactataaatgtgtgaagttggagtatacctttaccttcttatttggctttgtgatagtttaatttatatgtattttgagttctgacttgtatttctttgaattgattctagtttaagtaatccatggcacctaaaaagaagaggaaagttatggacaaaaagtactccatagggctcgatatcggcacaaacagtgtggggtgggcagtcatcactgacgactacaaggtcccctccaagaagttcaaggtcctcggcaatacagaccgccactccatcaagaagaacctcatcggagcactgttgttcgactccggagaaactgccgaagcaaccagactcaagaggaccgccagaagaaggtacacaaggcgcaagaacaggatctgctacctccaggagatcttcagtaacgagatggcaaaggtcgacgactctttcttccacaggctcgaggaatccttcctcgtcgaggaggacaagaagcatgagagacaccccatcttcggaaacatcgtcgacgaggtaagtttctgcttctacctttgatatatatataataattatcattaattagtagtaatataatatttcaaatatttttttcaaaataaaagaatgtagtatatagcaattgcttttctgtagtttataagtgtgtatattttaatttataacttttctaatatatgaccaaaacatggtgatgtgcaggtcgcctaccacgagaagtacccaaccatctaccacctgaggaagaagctcgtcgacagtaccgacaaggctgacctcaggctcatctacctcgcactcgcccacatgattaagttcaggggccacttcctcatagagggagacctcaacccagacaactccgacgtcgacaaactcttcatccaactcgtgcagacctacaatcaactctttgaagagaacccaatcaacgcctccggagtggatgctaaggctatattgtccgccaggctctccaaatcaagacgcctcgaaaacctcatcgcccagctcccaggggagaagaaaaatagcctcttcgggaacctcatagccctgtcccttggactcacccctaacttcaaatcaaatttcgacctcgcagaggacgctaagcttcaactctccaaggacacctacgacgacgacctcgataacctcctcgcccaaatcggtgatcaatacgctgacctcttcctcgctgctaagaacctctccgacgccatactcctctccgacattctgagggtcaacaccgagatcacaaaggctcccttgtccgcctccatgattaaacgctacgacgaacaccaccaggacctcaccctcttgaaggcactggttagacagcagctccccgagaagtacaaggaaatcttcttcgaccaatcaaaaaacggctacgccggatacatcgacggaggagcatcccaggaagagttctacaagttcatcaaaccaattctcgaaaagatggacggaacagaggagctcttggtcaagctcaacagggaggacctcctcagaaagcagagaaccttcgacaacggcagtatcccccaccagatccaccttggagagttgcacgcaatcctcaggaggcaagaggacttctaccccttcctcaaggacaacagggagaagatcgagaagatccttacattccgcatcccctactacgtcggacctttggcaagaggaaactcccgcttcgcatggatgactcgcaagagtgaggaaaccatcaccccttggaacttcgaggaggtcgtcgataagggagcttcagcccagtccttcatcgagcgcatgaccaacttcgataaaaatctccccaatgaaaaagtcctccccaagcacagtctgctctacgagtacttcacagtctacaacgagctcaccaaggtcaagtacgtcaccgaaggcatgagaaaacccgccttcctcagtggcgagcagaagaaggcaatcgtggacttgctgttcaagaccaaccgcaaggtcacagtcaagcaattaaaagaggactacttcaagaaaatagagtgcttcgacagtgtcgagatctctggggtcgaggacaggttcaacgcatccttggggacctatcacgacctcctcaagatcattaaagacaaggacttcctcgacaacgaggagaacgaggacatactggaggacatcgtcctcaccctcactctctttgaggacagggagatgatagaggagcgcctcaaaacctacgcccacctcttcgacgacaaggtgatgaaacagctcaagaggcgcagatacaccggatggggtagactctccaggaagctgattaatggcatccgcgacaaacagtccggcaagaccatcctcgacttcctcaagagtgacggattcgccaaccgcaacttcatgcagctcatacacgacgactccctcaccttcaaggaggacatccaaaaagcccaagtctccggacagggagactcattgcacgaacacatcgccaacttggctggatctcctgctattaaaaagggcatcctccaaaccgtcaaggtggtcgacgaactcgtcaaggtcatgggtagacacaagcccgaaaatatcgtcatcgagatggcaagggagaaccagacaacccagaagggccaaaaaaactccagggagcgcatgaaacgcatcgaggagggaataaaggagctcgggtcccagatcctcaaggagcaccccgtcgaaaatactcaactccagaatgaaaagctctacctctactacctccaaaacggcagggatatgtacgtcgaccaagagctcgacattaatcgcctctccgactacgacgtcgatcacatcgtcccccagagtttcctcaaggacgactccatcgacaacaaggtcctcaccagatccgataaaaatcgcggaaagtccgacaacgtcccctctgaggaagtggttaagaagatgaaaaactactggagacagctcctcaacgcaaagctgatcacccagcgcaagttcgacaacctcacaaaggctgagagagggggactctctgagttggacaaggccggcttcatcaagagacaactcgtggaaacccgccagatcaccaagcatgtcgcacagattctcgactcccgcatgaatactaaatacgatgaaaatgacaagctcatcagggaggtcaaggtcatcaccctgaagtccaagctcgtctccgacttccgcaaggacttccagttctacaaggtccgcgagatcaacaactaccaccacgcccacgacgcatacctcaacgctgtggttggaacagcactcatcaagaagtaccccaagctcgagtccgagttcgtctacggcgactacaaggtctacgacgtcaggaagatgatcgccaagtccgagcaagagatcggaaaggccaccgcaaaatatttcttctactccaacataatgaacttcttcaaaaccgagatcaccctggctaacggagaaataaggaagaggcccctgatagaaaccaacggcgagacaggcgagattgtctgggacaaaggcagggacttcgcaaccgtcagaaaggtgctcagtatgcctcaggtcaacatagtcaaaaagaccgaagtccagactggaggattctccaaggagtccatcctccccaaaaggaactccgacaaactgatcgccaggaaaaaggactgggaccccaaaaaatatggcggcttcgactcccctactgttgcttacagtgtgctcgtcgtcgcaaaagtcgagaaggggaaatccaagaagctcaagtcagtgaaggagctcctcggcatcaccatcatggagaggtcctccttcgagaagaaccccatcgacttcctcgaggccaagggatataaggaggtcaagaaggacctcatcattaaactccccaagtactccctcttcgagctcgaaaacggacgcaagaggatgctcgcttcagctggtgaactccagaagggcaacgaactcgctttgccctctaaatacgtcaacttcctctacctcgcctcccactatgaaaagctcaagggctccccagaggacaacgagcagaagcaactcttcgtcgagcagcacaagcattacctcgacgagatcatcgagcagatctccgagttctccaagagagtcatcctcgctgacgcaaacctcgacaaggtcctcagtgcatataacaagcaccgcgacaaaccaataagggagcaggccgaaaatattatacacctgttcaccctcaccaacttgggagcaccagccgccttcaagtatttcgacaccaccatcgacagaaagcgctacacctccacaaaggaggtcctggacgccacacttatccaccagtccatcaccggcctctatgaaacacgcatcgacctctctcaattgggaggggacaagagaccaagagacagacacgatggagagcttggaggtagaaagagagcaaggtagttcgaactggccaggtaccgttaacctagacttgtccatcttctggattggccaacttaattaatgtatgaaataaaaggatgcacacatagtgacatgctaatcactataatgtgggcatcaaagttgtgtgttatgtgtaattactagttatctgaataaaagagaaagagatcatccatatttcttatcctaaatgaatgtcacgtgtctttataattctttgatgaaccagatgcatttcattaaccaaatccatatacatataaatattaatcatatataattaatatcaattgggttagcaaaacaaatctagtctaggtgtgttttgcaagcttggcgcgccgttaacttaacggcaaacgctaattagtcactaggcccaggaaacactaactaagccctagcttatcctagcgcaacctagttaggtcttggtaacccgaaatctagtctaggtgtgttttgcgatccgatatcgatgcggccgcctggaattcgcccttcccaagctttgctctagatcaaactcacatccaaacataacatggatatcttccttaccaatcatactaattattttgggttaaatattaatcattatttttaagatattaattaagaaattaaaagattttttaaaaaaatgtataaaattatattattcatgatttttcatacatttgattttgataataaatatattttttttaatttcttaaaaaatgttgcaagacacttattagacatagtcttgttctgtttacaaaagcattcatcatttaatacattaaaaaatatttaatactaacagtagaatcttcttgtgagtggtgtgggagtaggcaacctggcattgaaacgagagaaagagagtcagaaccagaagacaaataaaaagtatgcaacaaacaaatcaaaatcaaagggcaaaggctggggttggctcaattggttgctacattcaattttcaactcagtcaacggttgagattcactctgacttccccaatctaagccgcggatgcaaacggttgaatctaacccacaatccaatctcgttacttaggggcttttccgtcattaactcacccctgccacccggtttccctataaattggaactcaatgctcccctctaaactcgtatcgcttcagagttgagaccaagacacactcgttcatatatctctctgctcttctcttctcttctacctctcaaggtacttttcttctccctctaccaaatcctagattccgtggttcaatttcggatcttgcacttctggtttgctttgccttgctttttcctcaactgggtccatctaggatccatgtgaaactctactctttctttaatatctgcggaatacgcgtttgactttcagatctagtcgaaatcatttcataattgcctttctttcttttagcttatgagaaataaaatcactttttttttatttcaaaataaaccttgggccttgtgctgactgagatggggtttggtgattacagaattttagcgaattttgtaattgtacttgtttgtctgtagttttgttttgttttcttgtttctcatacattccttaggcttcaattttattcgagtataggtcacaataggaattcaaactttgagcaggggaattaatcccttccttcaaatccagtttgtttgtatatatgtttaaaaaatgaaacttttgctttaaattctattataactttttttatggctgaaatttttgcatgtgtctttgctctctgttgtaaatttactgtttaggtactaactctaggcttgttgtgcagtttttgaagtataaccatgccacacaacacaatggcggccaccgcttccagaaccacccgattctcttcttcctcttcacaccccaccttccccaaacgcattactagatccaccctccctctctctcatcaaaccctcaccaaacccaaccacgctctcaaaatcaaatgttccatctccaaaccccccacggcggcgcccttcaccaaggaagcgccgaccacggagcccttcgtgtcacggttcgcctccggcgaacctcgcaagggcgcggacatccttgtggaggcgctggagaggcagggcgtgacgacggtgttcgcgtaccccggcggtgcgtcgatggagatccaccaggcgctcacgcgctccgccgccatccgcaacgtgctcccgcgccacgagcagggcggcgtcttcgccgccgaaggctacgcgcgttcctccggcctccccggcgtctgcattgccacctccggccccggcgccaccaacctcgtgagcggcctcgccgacgctttaatggacagcgtcccagtcgtcgccatcaccggccaggtcgcccgccggatgatcggcaccgacgccttccaagaaaccccgatcgtggaggtgagcagatccatcacgaagcacaactacctcatcctcgacgtcgacgacatcccccgcgtcgtcgccgaggctttcttcgtcgccacctccggccgccccggtccggtcctcatcgacattcccaaagacgttcagcagcaactcgccgtgcctaattgggacgagcccgttaacctccccggttacctcgccaggctgcccaggccccccgccgaggcccaattggaacacattgtcagactcatcatggaggcccaaaagcccgttctctacgtcggcggtggcagtttgaattccagtgctgaattgaggcgctttgttgaactcactggtattcccgttgctagcactttaatgggtcttggaacttttcctattggtgatgaatattcccttcagatgctgggtatgcatggtactgtttatgctaactatgctgttgacaatagtgatttgttgcttgcctttggggtaaggtttgatgaccgtgttactgggaagcttgaggcttttgctagtagggctaagattgttcacattgatattgattctgccgagattgggaagaacaagcaggcgcacgtgtcggtttgcgcggatttgaagttggccttgaagggaattaatatgattttggaggagaaaggagtggagggtaagtttgatcttggaggttggagagaagagattaatgtgcagaaacacaagtttccattgggttacaagacattccaggacgcgatttctccgcagcatgctatcgaggttcttgatgagttgactaatggagatgctattgttagtactggggttgggcagcatcaaatgtgggctgcgcagttttacaagtacaagagaccgaggcagtggttgacctcagggggtcttggagccatgggttttggattgcctgcggctattggtgctgctgttgctaaccctggggctgttgtggttgacattgatggggatggtagtttcatcatgaatgttcaggagttggccactataagagtggagaatctcccagttaagatattgttgttgaacaatcagcatttgggtatggtggttcagttggaggataggttctacaagtccaatagagctcacacctatcttggagatccgtctagcgagagcgagatattcccaaacatgctcaagtttgctgatgcttgtgggataccggcagcgcgagtgacgaagaaggaagagcttagagcggcaattcagagaatgttggacacccctggcccctaccttcttgatgtcattgtgccccatcaggagcatgtgttgccgatgattcccagtaatggatccttcaaggatgtgataactgagggtgatggtagaacgaggtactgattgcctagaccaaatgttccttgatgcttgttttgtacaatatatataagataatgctgtcctagttgcaggatttggcctgtggtgagcatcatagtctgtagtagttttggtagcaagacattttattttccttttatttaacttactacatgcagtagcatctatctatctctgtagtctgatatctcctgttgtctgtattgtgccgttggattttttgctgtagtgagactgaaaatgatgtgctagtaataatatttctgttagaaatctaagtagagaatctgttgaagaagtcaaaagctaatggaatcaggttacatattcaatgtttttctttttttagcggttggtagacgtgtagattcaacttctcttggagctcacctaggcaatcagtaaaatgcatattccttttttaacttgccatttatttacttttagtggaaattgtgaccaatttgttcatgtagaacggatttggaccattgcgtccacaaaacgtctcttttgctcgatcttcacaaagcgataccgaaatccagagatagttttcaaaagtcagaaatggcaaagttataaatagtaaaacagaatagatgctgtaatcgacttcaataacaagtggcatcacgtttctagttctagacccatcagctgaggtacaaattaattaataagtgactagggtcacgtgaccctagtcacttatgattccgatgacttcgtaggttcctagctcaagccgctcgtgtccaagcgtcacttacgattagctaatgattacggcatctaggaccgactagttcttatgtgcttctagtctccaaatgtggttgatagttattttgctctaagatcaacagtaatgaagtataaatcatcgttgtggtgtgctactcggttaattgagcattaacacacacaaacatgacgaggatggtataatctccaaaaatgtgtactttgttaggtgggaccctatagccttgattaatgtgctatgttaggcatgcctggaaacgtgtgacgcatatgttttgtgaacctgttgatattatatgtgcttttatattaccatattttattaaaatactaatatttattactagtaagatataacattctatctagcttaaaaactaaccataaatattccataataactagatttaccaaactaatatactaaatatacataataaatacaaaattaacaagacaataatcaatatttatgagcttaatatatttagacattatggttggtcgacgataatcatgctaacttttcgtaattgcttgattgaaatatgcttagaataatgcctctttgttctacatggcaaatagggaccattatggtgtaacaccctgggaaccacaaacaccccgaaatgctactaaactacacaactaaccttcatatataaaatttcgacagcatctcctttgaaaatttgcatagacgtggaagcaacagagtataaacagatctagctagctaagtttctagctagctaagtttaaacggccggccaaacgtgcaagcgctactagacaattcagtacattaaaaacgtccgcaatgtgttattaagttgtctaagcgtcaatttatttacaattgaatatatcctgccaccagccagccaacagctccccgaccggcagctcggcacaaaatcaccactcgatacaggcagcccatcagtccgggacggcgtcagcgggagagccgttgtaaggcggcagactttgctcatgttaccgatgctattcggaagaacggcaactaagctgccgggtttgaaacacggatgatctcgcggagggtagcatgttgattgtaacgatgacagagcgttgctgcctgtgatcaaatatcatctccctcgcagagatccgaattatcagccttcttattcatttctcgcttaaccgtgacaggcgcgcgcggtgccacctgggtccttttcatcacgtgctataaaaataattataatttaaattttttaatataaatatataaattaaaaatagaaagtaaaaaaagaaattaaagaaaaaatagtttttgttttccgaagatgtaaaagactctagggggatcgccaacaaatactaccttttatcttgctcttcctgctctcaggtattaatgccgaattgtttcatcttgtctgtgtagaagaccacacacgaaaatcctgtgattttacattttacttatcgttaatcgaatgtatatctatttaatctgcttttcttgtctaataaatatatatgtaaagtacgctttttgttgaaattttttaaacctttgtttatttttttttcttcattccgtaactcttctaccttctttatttactttctaaaatccaaatacaaaacataaaaataaataaacacagagtaaattcccaaattattccatcattaaaagatacgaggcgcgtgtaagttacaggcaagcgatccgtcctaagaaaccattattatcatgacattaacctataaaaataggcgtatcacgaggccctttcgtctcgcgcgtttcggtgatgacggtgaaaacctctgacacatgcagctcccggagacggtcacagcttgtctgtaagcggatgccgggagcagacaagcccgtcagggcgcgtcagcgggtgttggcgggtgtcggggctggcttaactatgcggcatcagagcagattgtactgagagtgcaccataccacagcttttcaattcaattcatcattttttttttattcttttttttgatttcggtttctttgaaatttttttgattcggtaatctccgaacagaaggaagaacgaaggaaggagcacagacttagattggtatatatacgcatatgtagtgttgaagaaacatgaaattgcccagtattcttaacccaactgcacagaacaaaaacctgcaggaaacgaagataaatcatgtcgaaagctacatataaggaacgtgctgctactcatcctagtcctgttgctgccaagctatttaatatcatgcacgaaaagcaaacaaacttgtgtgcttcattggatgttcgtaccaccaaggaattactggagttagttgaagcattaggtcccaaaatttgtttactaaaaacacatgtggatatcttgactgatttttccatggagggcacagttaagccgctaaaggcattatccgccaagtacaattttttactcttcgaagacagaaaatttgctgacattggtaatacagtcaaattgcagtactctgcgggtgtatacagaatagcagaatgggcagacattacgaatgcacacggtgtggtgggcccaggtattgttagcggtttgaagcaggcggcagaagaagtaacaaaggaacctagaggccttttgatgttagcagaattgtcatgcaagggctccctatctactggagaatatactaagggtactgttgacattgcgaagagcgacaaagattttgttatcggctttattgctcaaagagacatgggtggaagagatgaaggttacgattggttgattatgacacccggtgtgggtttagatgacaagggagacgcattgggtcaacagtatagaaccgtggatgatgtggtctctacaggatctgacattattattgttggaagaggactatttgcaaagggaagggatgctaaggtagagggtgaacgttacagaaaagcaggctgggaagcatatttgagaagatgcggccagcaaaactaaaaaactgtattataagtaaacgcgcgcgggcgcgccttttcagcctgatacagattaaatcagaacgcagaagcggtctgataaaacagaatttgcctggcggcagtagcgcggtggtcccacctgaccccatgccgaactcagaagtgaaacgccgtagcgccgatggtagtgtggggtctccccatgcgagagtagggaactgccaggcatcaaataaaacgaaaggctcagtcgaaagactgggcctttcgttttatctgttgtttgtcggtgaacgctctcctgagtaggacaaatccgccgggagcggatttgaacgttgcgaagcaacggcccggagggtggcgggcaggacgcccgccataaactgccaggcatcaaattaagcagaaggccatcctgacggatggcctttttgcgtttctacaaactcttaccgcacccggagcgggcgcgaggccgccaaggcccgaggcgtgaagtttggcccccgccctaccctcaccccggcacagatcgcgcacgcccgcgagctgatcgaccaggaaggccgcaccgtgaaagaggcggctgcactgcttggcgtgcatcgctcgaccctgtaccgcgcacttgagcgcagcgaggaagtgacgcccaccgaggccaggcggcgcggtgccttccgtgaggacgcattgaccgaggccgacgccctggcggccgccgagaatgaacgccaagaggaacaagcatgaaaccgcaccaggacggccaggacgaaccgtttttcattaccgaagagatcgaggcggagatgatcgcggccgggtacgtgttcgagccgcccgcgcacgtctcaaccgtgcggctgcatgaaatcctggccggtttgtctgatgccaagctggcggcctggccggccagcttggccgctgaagaaaccgagcgccgccgtctaaaaaggtgatgtgtatttgagtaaaacagcttgcgtcatgcggtcgctgcgtatatgatgcgatgagtaaataaacaaatacgcaaggggaacgcatgaaggttatcgctgtacttaaccagaaaggcgggtcaggcaagacgaccatcgcaacccatctagcccgcgccctgcaactcgccggggccgatgttctgttagtcgattccgatccccagggcagtgcccgcgattgggcggccgtgcgggaagatcaaccgctaaccgttgtcggcatcgaccgcccgacgattgaccgcgacgtgaaggccatcggccggcgcgacttcgtagtgatcgacggagcgccccaggcggcggacttggctgtgtccgcgatcaaggcagccgacttcgtgctgattccggtgcagccaagcccttacgacatatgggccaccgccgacctggtggagctggttaagcagcgcattgaggtcacggatggaaggctacaagcggcctttgtcgtgtcgcgggcgatcaaaggcacgcgcatcggcggtgaggttgccgaggcgctggccgggtacgagctgcccattcttgagtcccgtatcacgcagcgcgtgagctacccaggcactgccgccgccggcacaaccgttcttgaatcagaacccgagggcgacgctgcccgcgaggtccaggcgctggccgctgaaattaaatcaaaactcatttgagttaatgaggtaaagagaaaatgagcaaaagcacaaacacgctaagtgccggccgtccgagcgcacgcagcagcaaggctgcaacgttggccagcctcgcagacacgccagccatgaagcgggtcaactttcagttgccggcggaggatcacaccaagctgaagatgtacgcggtacgccaaggcaagaccattaccgagctgctatctgaatacatcgcgcagctaccagagtaaatgagcaaatgaataaatgagtagatgaattttagcggctaaaggaggcggcatggaaaatcaagaacaaccaggcaccgacgccgtggaatgccccatgtgtggaggaacgggcggttggccaggcgtaagcggctgggttgcctgccggccctgcaatggcactggaacccccaagcccgaggaatcggcgtgagcggtcgcaaaccatccggcccggtacaaatcggcgcggcgctgggtgatgacctggtggagaagttgaaggcagcgcaggccgcccagcggcaacgcatcgaggcagaagcacgccccggtgaatcgtggcaagcagccgctgatcgaatccgcaaagaatcccggcaaccgccggcagccggtgcgccgtcgattaggaagccgcccaagggcgacgagcaaccagattttttcgttccgatgctctatgacgtgggcacccgcgatagtcgcagcatcatggacgtggccgttttccgtctgtcgaagcgtgaccgacgagctggcgaggtgatccgctacgagcttccagacgggcacgtagaggtttccgcagggccggcaggcatggccagtgtgtgggattacgacctggtactgatggcggtttcccatctaaccgaatccatgaaccgataccgggaagggaagggagacaagcccggccgcgtgttccgtccacacgttgcggacgtactcaagttctgccggcgagccgatggcggaaagcagaaagacgacctggtagaaacctgcattcggttaaacaccacgcacgttgccatgcagcgtacgaagaaggccaagaacggccgcctggtgacggtatccgagggtgaagccttgattagccgctacaagatcgtaaagagcgaaaccgggcggccggagtacatcgagatcgagctagctgattggatgtaccgcgagatcacagaaggcaagaacccggacgtgctgacggttcaccccgattactttttgatcgatcccggcatcggccgttttctctaccgcctggcacgccgcgccgcaggcaaggcagaagccagatggttgttcaagacgatctacgaacgcagtggcagcgccggagagttcaagaagttctgtttcaccgtgcgcaagctgatcgggtcaaatgacctgccggagtacgatttgaaggaggaggcggggcaggctggcccgatcctagtcatgcgctaccgcaacctgatcgagggcgaagcatccgccggttcctaatgtacggagcagatgctagggcaaattgccctagcaggggaaaaaggtcgaaaaggtctctttcctgtggatagcacgtacattgggaacccaaagccgtacattgggaaccggaacccgtacattgggaacccaaagccgtacattgggaaccggtcacacatgtaagtgactgatataaaagagaaaaaaggcgatttttccgcctaaaactctttaaaacttattaaaactcttaaaacccgcctggcctgtgcataactgtctggccagcgcacagccgaagagctgcaaaaagcgcctacccttcggtcgctgcgctccctacgccccgccgcttcgcgtcggcctatggcgcgccggaaaatatgcatggcatgcccgttccatacagaagctgggcgaacaaacgatgctcgccttccagaaaaccgaggatgcgaaccacttcatccggggtcagcaccaccggcaagcgccgcgacggccgaggtcttccgatctcctgaagccagggcagatccgtgcacagcaccttgccgtagaagaacagcaaggccgccaatgcctgacgatgcgtggagaccgaaaccttgcgctcgttcgccagccaggacagaaatgcctcgacttcgctgctgcccaaggttgccgggtgacgcacaccgtggaaacggatgaaggcacgaacccagtggacataagcctgttcggttcgtaagctgtaatgcaagtagcgtatgcgctcacgcaactggtccagaaccttgaccgaacgcagcggtggtaacggcgcagtggcggttttcatggcttgttatgactgtttttttggggtacagtctatgcctcgggcatccaagcagcaagcgcgttacgccgtgggtcgatgtttgatgttatggagcagcaacgatgttacgcagcagggcagtcgccctaaaacaaagttaaacatcatgagggaagcggtgatcgccgaagtatcgactcaactatcagaggtagttggcgtcatcgagcgccatctcgaaccgacgttgctggccgtacatttgtacggctccgcagtggatggcggcctgaagccacacagtgatattgatttgctggttacggtgacggtaaggcttgatgaaacaacgcggcgagctttgatcaacgaccttttggaaacttcggcttcccctggagagagcgagattctccgcgctgtagaagtcaccattgttgtgcacgacgacatcattccgtggcgttatccagctaagcgcgaactgcaatttggagaatggcagcgcaatgacattcttgcaggtatcttcgagccagccacgatcgacattgatctggctatcttgctgacaaaagcaagagaacatagcgttgccttggtaggtccagcggcggaggaactctttgatccggttcctgaacaggatctatttgaggcgctaaatgaaaccttaacgctatggaactcgccgcccgactgggctggcgatgagcgaaatgtagtgcttacgttgtcccgcatttggtacagcgcagtaaccggcaaaatcgcgccgaaggatgtcgctgccgactgggcaatggagcgcctgccggcccagtatcagcccgtcatacttgaagctagacaggcttatcttggacaagaagaagatcgcttggcctcgcgcgcagatcagttggaagaatttgtccactacgtgaaaggcgagatcaccaaggtagtcggcaaataatgtctaacaattcgttcaagccgacgccgcttcgcggcgcggcttaactcaagcgttagatgcactatacgtaaccaactagtaggaacagtgaattggagttcgtcttgttataattagcttcttgggggatctttaaatactgtagaaaagaggaaggaaataataaatggctaaaatgagaatatcaccggaattgaaaaaactgatcgaaaaataccgctgcgtaaaagatacggaaggaatgtctcctgctaaggtatataagctggtgggagaaaatgaaaacctatatttaaaaatgacggacagccggtataaagggaccacctatgatgtggaacgggaaaaggacatgatgctatggctggaaggaaagctgcctgttccaaaggtcctgcactttgaacggcatgatggctggagcaatctgctcatgagtgaggccgatggcgtcctttgctcggaagagtatgaagatgaacaaagccctgaaaagattatcgagctgtatgcggagtgcatcaggctctttcactccatcgacatatcggattgtccctatacgaatagcttagacagccgcttagccgaattggattacttactgaataacgatctggccgatgtggattgcgaaaactgggaagaagacactccatttaaagatccgcgcgagctgtatgattttttaaagacggaaaagcccgaagaggaacttgtcttttcccacggcgacctgggagacagcaacatctttgtgaaagatggcaaagtaagtggctttattgatcttgggagaagcggcagggcggacaagtggtatgacattgccttctgcgtccggtcgatcagggaggatatcggggaagaacagtatgtcgagctattttttgacttactggggatcaagcctgattgggagaaaataaaatattatattttactggatgaattgttttagtacctagatacttcgctcgtgaaaagcagcgctcagggggctagtgcgctcttccgcttcctcgctcactgactcgctgcgctcggtcgttcggctgcggcgagcggtatcagctcactcaaaggcggtaatacggttatccacagaatcaggggataacgcaggaaagaacatgtgagcaaaaggccagcaaaaggccaggaaccgtaaaaaggccgcgttgctggcgtttttccataggctccgcccccctgacgagcatcacaaaaatcgacgctcaagtcagaggtggcgaaacccgacaggactataaagataccaggcgtttccccctggaagctccctcgtgcgctctcctgttccgaccctgccgcttaccggatacctgtccgcctttctcccttcgggaagcgtggcgctttctcatagctcacgctgtaggtatctcagttcggtgtaggtcgttcgctccaagctgggctgtgtgcacgaaccccccgttcagcccgaccgctgcgccttatccggtaactatcgtcttgagtccaacccggtaagacacgacttatcgccactggcagcagccactggtaacaggattagcagagcgaggtatgtaggcggtgctacagagttcttgaagtggtggcctaactacggctacactagaagaacagtatttggtatctgcgctctgctgaagccagttaccttcggaaaaagagttggtagctcttgatccggcaaacaaaccaccgctggtagcggtggtttttttgtttgcaagcagcagattacgcgcagaaaaaaaggatctcaagaagatcctttgatcttttctacggggtctgacgctcagtggaacgaaaactcacgttaagggattttggtcatgagattatcaaaaaggatcttcacctagatccttttaaattaaaaatgaagcgtacgttggaatcgcttctacaaaa

SEQ ID NO: 104 - DNA, 33156 bp, Artificial Sequence
  Nucleotide sequence of Vector 16
ctcacagaaacaatcaaacaaacatacacagcgatttattcacacgaacccgaattacaacggtatatatcctgtcagccaacaccaaaacatcaaaaaaatcgggatcaggatcaggatctgcggccgcatcctgcaggagctcaaacgagcaggaagcaacgagagggtggcgcgcgaccgacgtgcgtacgtagcatgagcctgagtggagacgttggacgtgtatgtatatacctctctgcgtgttaactatgtacgtaagcggcaggcagtgcaataagtgtggctctgtagtatgtacgtgcgggtacgatgctgtaagctactgaggcaagtccataaataaataatgacacgtgcgtgttctataatctcttcgcttcttcatttgtccccttgcggagtttggcatccattgatgccgttacgctgagaacagacacagcagacgaaccaaaagtgagttcttgtatgaaactatgacccttcatcgctaggctcaaacagcaccccgtacgaacacagcaaattagtcatctaactattagcccctacatgtttcagacgatacataaatatagcccatccttagcaattagctattggccctgcccatcccaagcaatgatctcgaagtatttttaatatatagtatttttaatatgtagcttttaaaattagaagataattttgagacaaaaatctccaagtatttttttgggtattttttactgcctccgtttttctttatttctcgtcacctagtttaattttgtgctaatcggctataaacgaaacagagagaaaagttactctaaaagcaactccaacagattagatataaatcttatatcctgcctagagctgttaaaaagatagacaactttagtggattagtgtatgcaacaaactctccaaatttaagtatcccaactacccaacgcatatcgttcccttttcattggcgcacgaactttcacctgctatagccgacgtacatgttcgttttttttgggcggcgcttactttcttccccgttcgttctcagcatcgcaactcaatttgttatggcggagaagcccttgtatcccaggtagtaatgcacagatatgcattattattattcataaaacgaacgctcttcaactggaagagcggttactaccggttcactagctagctgctaatcgagctagttaccctatgaggtgacatgaagcgctcacggttactatgacggttagcttcacgactgttggtggcagtagcgtacgacttagctatagttccggacttacctagctaggttaccccgggcaatcaaattatatatgtaaagcaattacagtttatcaaactttatttatggaaataatttattatcacatttattttggtttataaattttaaattaaaatatcacctaaataaaaataatttttaacatgacttattgtcctaaataaattatttccgtaaattaaataaaatgaagtttttttctttcaaagaatctaaatggtcataatgagaattctctaaaaaaatacataatgagaataattatggaatttatttattaataaaaattaatagcattttgatagacaattaataaaattttaaaaataaccatatagaaataataatttttttactatcggttccaattaaaataatgataaaaaataaaatagattattaattgatattgatatgaaatttaaataaagaatataatcatatattttattgatatatgatatgatatagattaattgatattgattttgatatggaatttaaaaataatataataattgtttttatttattaatacgtgtaatcaaataattctcactttttgaatcaatcagtgtacttaaagataatatcagttgaatattttttatccttttacgtgtgctgtgagacattatcatcaattgtgttgtatatgatatatagatatagatatataaatatatagattgagtgatataatatatttaaaatataaattatatatatgttttaatatatttttgcatatatatatatatttgtaaaaactagaagtattttttcatgagataattattatcgagttgaataagtctattatttgtgagagccaaccatatttatatatgtgattaaattttatctttgtgaaattaaaaataataaaaaataccttaaaatcataataatagaaaaacttatatttataatttaccattatacttaaaaaaaattaaataaatattataaatataaatactatcgagtaatggccgcgctagggtttttgagaaaaaatcttcccacgcactcaactgcactgtacggcgtcgttttcacagccgcataatagaagccgcgttccccaacccttcctcacaacattctcggaccctccagcaccgtcacccaaacaaatatccacgcggtagtaggcgcgtgaaacaaactctaatccgaactacgagacgtgagaagcacgcgctttagcgagcgtttcaattgtcgctacgaaagcagagaaggatacaaacggaactagggtaaattagtaagggtaatttcgtaaacagaagaaaagagttgtagctataaataaaccctctaaccctcgtcgcattacttctcttcacacctttgttcactcttcttctcttgcggctagggttttagcgcagcttcttctaggttcgttatctaccaccgttctatggattttattccttctattcgtgtttattctattggtttatgttgcttgcaatatgttttttctgaatctgtcgtcgttgtcttcaattttatccatgtttcagagatcaattttgtttgtgtagtatgtgcttattcttcttcttttcgttcgagttgttaataacggtgctatggtgttttcaaaagtgttttttttattacttttgatttaaagtttttttggtaaggcttttatttgcttgttatattcaaatctttggatccagatcttatataagtttttggttcaagaaagtttttggttactgatgaatagatctattaactgttactttaatcgattcaagctaaagttttttggttactgatgaatagatctattatctgttacttttaatcggttcaagctcaagttttttggttactgatgaatagatctatatacgtcacagtgtgctaaacatgcccttgttttatctcgatcttatgtatgggagtgccataaattttgttatgtctatttttttatctgttggaatcatactgagtttgatgcgttacgattgagcatacctatttttgggcttgttgtatggtgggtatttagatcttaatctttttatgcttatgaaaggttttgtaatgacaaaggtcttaatgttgttaaacttttatttttactttatatggtgtgttgatgtgttatggttttgacaactttttttttttctggatttttgcagatttaaggaagggtgctaagcacgacatccatggagcctcctcagcaccaacatcaccaccatcaggccgatcaagagtccgggaacaacaacaacaacaagtccggttccggagggtacacttgcagacagacctccaccagatggacacctaccactgagcagatcaagatcctgaaggagttgtactacaacaatgccatccgctcccctactgctgatcagattcagaagatcaccgctcgcctgcgtcaattcggtaagatcgagggtaagaacgtcttctactggttccagaaccacaaggctcgtgagaggcagaagaagcgtttcaacgggactaacatgaccactccttcctcatcacccaattctgttatgatggccgccaacgaccactaccatcctttgcttcatcaccaccacggagttcctatgcaaagacccgcaaactccgtcaacgtgaagttgaaccaggaccatcacctctaccaccacaacaagccctacccctctttcaacaacgggaatctcaaccatgcctcctctggaaccgaatgtggagttgtcaacgcctccaacggctacatgtcttcccacgtgtacggctctatggagcaagattgctccatgaactacaacaacgttggaggcggatgggcaaacatggatcaccactactcctccgctccctacaacttcttcgatagggctaaacctctcttcggcttggagggacaccaagaagaagaggaatgcggaggtgatgcttacttggaacacagaaggactctccctctctttccaatgcacggtgaggaccacatcaacggaggatctggcgctatctggaagtatggacagtccgaggtcagaccatgcgcttccctggaattgagactgaactagattgggacctaggaaacttatctctgttatgaatcagaagaagttcatgtctcgtttcatttaaaactttggtggtttgtgttttggggccttgtaaagcccctgatgaataattgttcaactatgtttccgttcctgtgttatacctttctttctaatgagtaatgacatcaaacttcttctgtattgaaattatgtccttgtgagtctctttatcatcgtttcgtctttacattatatgtgctacttttgtctaatgagcctgaaaagtggctccaatggtacgcactggaagatttgttggcttctggtagatatagcgacagtgttgagcttgtaatatcatgtctcttattgctaaattagttcctttcttaacagaaaccttcaaagtttttgtttttgttttcatttacctaatgtacacatacgctggccatgactaacaacatgtccaggcttagagcatatttttttctagcttaaattgttaacttgtcattcagtaaaatccgagaattgtgaagctctaattgaagctaattcgttttataaagtcagttaaaaagtatactaaattatccaacttttcttcaaaatctcaaaattctatgacaaaacgatagtctttgtttatgtcagtaccacaaagaggtggaaaaaaacaccaaaaaaacaataagcaaactatacactgagaagaaaaataaaagagagctcaatagatgttttatactaacggtagattagatcaaagatccaagctttactctacatagagcagaacccagaatcccttcatatctcttttattctagcaccgataatctactgaaaagaagacacttagagctctgtctctttgtcaaagaagtcccagccgtcatccagaagctccttacgttcattaacagaggtaccggcggccgggggctcggcgttaggcttttagtccgctaggtggctagaccgaggttaggacgctagttcactaggggcctagtggtgttttaaggatggcgaccccagtgatggcaactaagtggatcaacagcaacttttgctccgatttgcgatataatttgtcaaaacatgcctctaaaatcactctaacatcaaatttcttgaataacaattttatacactcccctcctccaacttgttatgtgcccttctgacccttcttgttttgtttgctagttaaccatgtaggaaaaagtatcactccactcaatagtattttcacttcatctggccataaataattttggcctaattcagcatcacgtatcaggagtcaataagcttgtctgtccgtctgtatttatcatctctcttcgtgctactatcacctccccttttcttatggatttttcctgttaaaaaacaaaaaggaacaggtaacccacttgaattaggacaccaatgtaggtgccaccacccgtttccttctgttgagtgtgcacgcttattggttcaacctcagaattaaattcttcataatcccctgttgagagaaaattataatagacaaatcaaattgtgtggacttgccatttcccaaaacattttcattttgtgcgcgtgtgggtggtggggtgcgttttattagaatgaagactgtaaaaaagaggagtgtaggatgataagaagtagtaaatgtcagttgtcaaaagatgaaaagcaacggaggaagggaccaaaccttgacctatggaaaactgagtgctatggtaattattgtcacaggatttaggatgattaataatagttcggaccacaaataaacagctttaagaagttcaactttcccccacggatagcaaatttggttggaccatctttgatgaaagtccccaatctcataattgccaaccttttttatacgaaactagtattttcataattatcaagaatcttcaactcatcagtgatcgctcatttctgattaagaaaaaaaaagggtgagtaaatgaatccattttgtctgttctccatggcccgggtaccctgggatccgatatcgatgggccctggccgaagctttgctctagatcaaactcacatccaaacataacatggatatcttccttaccaatcatactaattattttgggttaaatattaatcattatttttaagatattaattaagaaattaaaagattttttaaaaaaatgtataaaattatattattcatgatttttcatacatttgattttgataataaatatattttttttaatttcttaaaaaatgttgcaagacacttattagacatagtcttgttctgtttacaaaagcattcatcatttaatacattaaaaaatatttaatactaacagtagaatcttcttgtgagtggtgtgggagtaggcaacctggcattgaaacgagagaaagagagtcagaaccagaagacaaataaaaagtatgcaacaaacaaatcaaaatcaaagggcaaaggctggggttggctcaattggttgctacattcaattttcaactcagtcaacggttgagattcactctgacttccccaatctaagccgcggatgcaaacggttgaatctaacccacaatccaatctcgttacttaggggcttttccgtcattaactcacccctgccacccggtttccctataaattggaactcaatgctcccctctaaactcgtatcgcttcagagttgagaccaagacacactcgttcatatatctctctgctcttctcttctcttctacctctcaaggtacttttcttctccctctaccaaatcctagattccgtggttcaatttcggatcttgcacttctggtttgctttgccttgctttttcctcaactgggtccatctaggatccatgtgaaactctactctttctttaatatctgcggaatacgcgtttgactttcagatctagtcgaaatcatttcataattgcctttctttcttttagcttatgagaaataaaatcactttttttttatttcaaaataaaccttgggccttgtgctgactgagatggggtttggtgattacagaattttagcgaattttgtaattgtacttgtttgtctgtagttttgttttgttttcttgtttctcatacattccttaggcttcaattttattcgagtataggtcacaataggaattcaaactttgagcaggggaattaatcccttccttcaaatccagtttgtttgtatatatgtttaaaaaatgaaacttttgctttaaattctattataactttttttatggctgaaatttttgcatgtgtctttgctctctgttgtaaatttactgtttaggtactaactctaggcttgttgtgcagtttttgaagtataaccatgccacacaacacaatggcggccaccgcttccagaaccacccgattctcttcttcctcttcacaccccaccttccccaaacgcattactagatccaccctccctctctctcatcaaaccctcaccaaacccaaccacgctctcaaaatcaaatgttccatctccaaaccccccacggcggcgcccttcaccaaggaagcgccgaccacggagcccttcgtgtcacggttcgcctccggcgaacctcgcaagggcgcggacatccttgtggaggcgctggagaggcagggcgtgacgacggtgttcgcgtaccccggcggtgcgtcgatggagatccaccaggcgctcacgcgctccgccgccatccgcaacgtgctcccgcgccacgagcagggcggcgtcttcgccgccgaaggctacgcgcgttcctccggcctccccggcgtctgcattgccacctccggccccggcgccaccaacctcgtgagcggcctcgccgacgctttaatggacagcgtcccagtcgtcgccatcaccggccaggtcgcccgccggatgatcggcaccgacgccttccaagaaaccccgatcgtggaggtgagcagatccatcacgaagcacaactacctcatcctcgacgtcgacgacatcccccgcgtcgtcgccgaggctttcttcgtcgccacctccggccgccccggtccggtcctcatcgacattcccaaagacgttcagcagcaactcgccgtgcctaattgggacgagcccgttaacctccccggttacctcgccaggctgcccaggccccccgccgaggcccaattggaacacattgtcagactcatcatggaggcccaaaagcccgttctctacgtcggcggtggcagtttgaattccagtgctgaattgaggcgctttgttgaactcactggtattcccgttgctagcactttaatgggtcttggaacttttcctattggtgatgaatattcccttcagatgctgggtatgcatggtactgtttatgctaactatgctgttgacaatagtgatttgttgcttgcctttggggtaaggtttgatgaccgtgttactgggaagcttgaggcttttgctagtagggctaagattgttcacattgatattgattctgccgagattgggaagaacaagcaggcgcacgtgtcggtttgcgcggatttgaagttggccttgaagggaattaatatgattttggaggagaaaggagtggagggtaagtttgatcttggaggttggagagaagagattaatgtgcagaaacacaagtttccattgggttacaagacattccaggacgcgatttctccgcagcatgctatcgaggttcttgatgagttgactaatggagatgctattgttagtactggggttgggcagcatcaaatgtgggctgcgcagttttacaagtacaagagaccgaggcagtggttgacctcagggggtcttggagccatgggttttggattgcctgcggctattggtgctgctgttgctaaccctggggctgttgtggttgacattgatggggatggtagtttcatcatgaatgttcaggagttggccactataagagtggagaatctcccagttaagatattgttgttgaacaatcagcatttgggtatggtggttcagttggaggataggttctacaagtccaatagagctcacacctatcttggagatccgtctagcgagagcgagatattcccaaacatgctcaagtttgctgatgcttgtgggataccggcagcgcgagtgacgaagaaggaagagcttagagcggcaattcagagaatgttggacacccctggcccctaccttcttgatgtcattgtgccccatcaggagcatgtgttgccgatgattcccagtaatggatccttcaaggatgtgataactgagggtgatggtagaacgaggtactgattgcctagaccaaatgttccttgatgcttgttttgtacaatatatataagataatgctgtcctagttgcaggatttggcctgtggtgagcatcatagtctgtagtagttttggtagcaagacattttattttccttttatttaacttactacatgcagtagcatctatctatctctgtagtctgatatctcctgttgtctgtattgtgccgttggattttttgctgtagtgagactgaaaatgatgtgctagtaataatatttctgttagaaatctaagtagagaatctgttgaagaagtcaaaagctaatggaatcaggttacatattcaatgtttttctttttttagcggttggtagacgtgtagattcaacttctcttggagctcacctaggcaatcagtaaaatgcatattccttttttaacttgccatttatttacttttagtggaaattgtgaccaatttgttcatgtagaacggatttggaccattgcgtccacaaaacgtctcttttgctcgatcttcacaaagcgataccgaaatccagagatagttttcaaaagtcagaaatggcaaagttataaatagtaaaacagaatagatgctgtaatcgacttcaataacaagtggcatcacgtttctagttctagacccatcagctggggaattctagtggccggcccagctgatatcatgtcgtgcttagcacgtgatgcatcatagatgcggtaaattattactttctgtgactgggacaatgtgctcctccagtggccacgtatcggtaaaccttgtgccagaacactaatatttatataatcaacaataaagaatggtaagcattagacaaagacaaaaacaatttttaataatttacctgtactaattagaaggggtttgatttaattttattaaacttaacatgtgcaatatgtccctttgtttagaggaaaacaattacggtatttccttactaacgtaaactctgaatataatcatacatctgtattctgaaaaagaaaaaagaactagagataaaagcgtagaaacaacagtatgtggtcatagtcatacacgtaaagggatgaaaattgaaaatagaacctgcaggaaataagtttgcatttaatttggatatatatcttgaagtgtaaggttaacctctcagctattaaatagtactactactaacactcaaatagtacttctactagcactcacggtaacaatctcttagtagggatgggaataggccagatcggcctacaggggtctacgacttgaggtgctaagcacgacatccatggcctagatggcctcctccgagaacgtcatcaccgagttcatgcgcttcaaggtgcgcatggagggcaccgtgaacggccacgagttcgagatcgagggcgagggcgagggccgcccctacgagggccacaacaccgtgaagctgaaggtgacgaagggcggccccctgcccttcgcctgggacatcctgtccccccagttccagtacggctccaaggtgtacgtgaagcaccccgccgacatccccgactacaagaagctgtccttccccgagggcttcaagtgggagcgcgtgatgaacttcgaggacggcggcgtggcgaccgtgacccaggactcctccctgcaggacggctgcttcatctacaaggtgaagttcatcggcgtgaacttcccctccgacggccccgtgatgcagaagaagaccatgggctgggaggcctccaccgagcgcctgtacccccgcgacggcgtgctgaagggcgagacccacaaggccctgaagctgaaggacggcggccactacctggtggagttcaagtccatctacatggccaagaagcccgtgcagctgcccggctactactacgtggacgccaagctggacatcacctcccacaacgaggactacaccatcgtggagcagtacgagcgcaccgagggccgccaccacctgttcctgtagttttgtgatctgatgataagtggttggttcgtgtctcatgcacttgggaggtgatctatttcacctggtgtagtttgtgtttccgtcagttggaaaaacttatccctatcgatttcgttttcattttctgcttttcttttatgtaccttcgtttgggcttgtaacgggcctttgtatttcaactctcaataataatccaagtgcatgttaaacaatttgtcatctgtttcggctttgatatactactggtgaagatgggccgtactactgcatcacaacgaaaaataataataagatgaaaaacttgaagtggaaaaaaaaaaaaacttgaatgttcactactactcattgaccataatgtttaacatacatagctcaatagtatttttgtgaatatggcaacacaaacagtccaaaacaattgtctcttactataccaaaccaagggcgccgcttgtttgccactctttgtgtgcaatagtgtgattaccacatctccacattcaatatattccctgaattatctgacgattttgatggctcactgttttcccaagtcttgaattgtcttctgtgcgccagtcaaatgcatatgtgttgagtttatcttttaaatatcaagcttttgtttttaacttttgtttgtaaccaaaaactcacagtaggagtttgatcacataattttatgtttgcctttgcaatttctagtgagtctttgattaaaagcttgaaaagaaaatgcagccaagcttaccaagtaagttatgtgtattaaccagaggaagagagaatcttgcaaaatttcaacaaacacaaaaagaagtattactacgattggtggagaaagaaaacgattccaaatcttgaactgttgttgtaaaagcatagcagaaagtgggagacaaccgaaatagaaatgactataacttaatttaatgttatcattataatttcttctagcaaatatttagaaagtaaatatcacatcaacctttaatgtaattaagctttctctttttgattcatgtgagatgaaaagaaaaaaaagaagagaaaagtgtagaaaacacatcatttctaagctgaaggtacccgggtgtgatttagtataaagtgaagtaatggtcaaaagaaaaagtgtaaaacgaagtacctagtaataagtaatattgaacaaaataaatggtaaagtgtcagatatataaaataggctttaataaaaggaagaaaaaaaacaaacaaaaaataggttgcaatggggcagagcagagtcatcatgaagctagaaaggctaccgatagataaactatagttaattaaatacattaaaaaatacttggatctttctcttaccctgtttatattgagacctgaaacttgagagagatacactaatcttgccttgttgtttcattccctaacttacaggactcagcgcatgtcatgtggtctcgttccccatttaagtcccacaccgtctaaacttattaaattattaatgtttataactagatgcacaacaacaaagcttggtgctaagcacgacatccagttttagagctagaaatagcaagttaaaataaggctagtccgttatcaacttgaaaaagtggcaccgagtcggtgcttttttttcggaccgggttaccagtctaaaaacggcccctaactaacgcttagttgcccgctagattagtcccccgttagtgcctagttagacacacgacgaactaggggctactagtagcggccgcaattggatcgggtttacttattttgtgggtatctatacttttattagatttttaatcaggctcctgatttctttttatttcgattgaattcctgaacttgtattattcagtagatcgaataaattataaaaagataaaatcataaaataatattttatcctatcaatcatattaaagcaatgaatatgtaaaattaatcttatctttattttaaaaaatcatataggtttagtatttttttaaaaataaagataggattagttttactattcactgcttattacttttaaaaaaatcataaaggtttagtatttttttaaaataaatataggaatagttttactattcactgctttaatagaaaaatagtttaaaatttaagatagttttaatcccagcatttgccacgtttgaacgtgagccgaaacgatgtcgttacattatcttaacctagctgaaacgatgtcgtcataatatcgccaaatgccaactggactacgtcgaacccacaaatcccacaaagcgcgtgaaatcaaatcgctcaaaccacaaaaaagaacaacgcgtttgttacacgctcaatcccacgcgagtagagcacagtaaccttcaaataagcgaatggggcataatcagaaatccgaaataaacctaggggcattatcggaaatgaaaagtagctcactcaatataaaaatctaggaaccctagttttcgttatcactctgtgctccctcgctctatttctcagtctctgtgtttgcggctgaggattccgaacgagtgaccttcttcgtttctcgcaaaggtaacagcctctgctcttgtctcttcgattcgatctatgcctgtctcttatttacgatgatgtttcttcggttatgtttttttatttatgctttatgctgttgatgttcggttgtttgtttcgctttgtttttgtggttcagttttttaggattcttttggtttttgaatcgattaatcggaagagattttcgagttatttggtgtgttggaggtgaatcttttttttgaggtcatagatctgttgtatttgtgttataaacatgcgactttgtatgattttttacgaggttatgatgttctggttgttttattatgaatctgttgagacagaaccatgatttttgttgatgttcgtttacactattaaaggtttgttttaacaggattaaaagttttttaagcatgttgaaggagtcttgtagatatgtaaccgtcgatagtttttttgtgggtttgttcacatgttatcaagcttaatcttttactatgtatgcgaccatatctggatccagcaaaggcgattttttaattccttgtgaaacttttgtaatatgaagttgaaattttgttattggtaaactataaatgtgtgaagttggagtatacctttaccttcttatttggctttgtgatagtttaatttatatgtattttgagttctgacttgtatttctttgaattgattctagtttaagtaatccatggcacctaaaaagaagaggaaagttatggacaaaaagtactccatagggctcgatatcggcacaaacagtgtggggtgggcagtcatcactgacgactacaaggtcccctccaagaagttcaaggtcctcggcaatacagaccgccactccatcaagaagaacctcatcggagcactgttgttcgactccggagaaactgccgaagcaaccagactcaagaggaccgccagaagaaggtacacaaggcgcaagaacaggatctgctacctccaggagatcttcagtaacgagatggcaaaggtcgacgactctttcttccacaggctcgaggaatccttcctcgtcgaggaggacaagaagcatgagagacaccccatcttcggaaacatcgtcgacgaggtaagtttctgcttctacctttgatatatatataataattatcattaattagtagtaatataatatttcaaatatttttttcaaaataaaagaatgtagtatatagcaattgcttttctgtagtttataagtgtgtatattttaatttataacttttctaatatatgaccaaaacatggtgatgtgcaggtcgcctaccacgagaagtacccaaccatctaccacctgaggaagaagctcgtcgacagtaccgacaaggctgacctcaggctcatctacctcgcactcgcccacatgattaagttcaggggccacttcctcatagagggagacctcaacccagacaactccgacgtcgacaaactcttcatccaactcgtgcagacctacaatcaactctttgaagagaacccaatcaacgcctccggagtggatgctaaggctatattgtccgccaggctctccaaatcaagacgcctcgaaaacctcatcgcccagctcccaggggagaagaaaaatagcctcttcgggaacctcatagccctgtcccttggactcacccctaacttcaaatcaaatttcgacctcgcagaggacgctaagcttcaactctccaaggacacctacgacgacgacctcgataacctcctcgcccaaatcggtgatcaatacgctgacctcttcctcgctgctaagaacctctccgacgccatactcctctccgacattctgagggtcaacaccgagatcacaaaggctcccttgtccgcctccatgattaaacgctacgacgaacaccaccaggacctcaccctcttgaaggcactggttagacagcagctccccgagaagtacaaggaaatcttcttcgaccaatcaaaaaacggctacgccggatacatcgacggaggagcatcccaggaagagttctacaagttcatcaaaccaattctcgaaaagatggacggaacagaggagctcttggtcaagctcaacagggaggacctcctcagaaagcagagaaccttcgacaacggcagtatcccccaccagatccaccttggagagttgcacgcaatcctcaggaggcaagaggacttctaccccttcctcaaggacaacagggagaagatcgagaagatccttacattccgcatcccctactacgtcggacctttggcaagaggaaactcccgcttcgcatggatgactcgcaagagtgaggaaaccatcaccccttggaacttcgaggaggtcgtcgataagggagcttcagcccagtccttcatcgagcgcatgaccaacttcgataaaaatctccccaatgaaaaagtcctccccaagcacagtctgctctacgagtacttcacagtctacaacgagctcaccaaggtcaagtacgtcaccgaaggcatgagaaaacccgccttcctcagtggcgagcagaagaaggcaatcgtggacttgctgttcaagaccaaccgcaaggtcacagtcaagcaattaaaagaggactacttcaagaaaatagagtgcttcgacagtgtcgagatctctggggtcgaggacaggttcaacgcatccttggggacctatcacgacctcctcaagatcattaaagacaaggacttcctcgacaacgaggagaacgaggacatactggaggacatcgtcctcaccctcactctctttgaggacagggagatgatagaggagcgcctcaaaacctacgcccacctcttcgacgacaaggtgatgaaacagctcaagaggcgcagatacaccggatggggtagactctccaggaagctgattaatggcatccgcgacaaacagtccggcaagaccatcctcgacttcctcaagagtgacggattcgccaaccgcaacttcatgcagctcatacacgacgactccctcaccttcaaggaggacatccaaaaagcccaagtctccggacagggagactcattgcacgaacacatcgccaacttggctggatctcctgctattaaaaagggcatcctccaaaccgtcaaggtggtcgacgaactcgtcaaggtcatgggtagacacaagcccgaaaatatcgtcatcgagatggcaagggagaaccagacaacccagaagggccaaaaaaactccagggagcgcatgaaacgcatcgaggagggaataaaggagctcgggtcccagatcctcaaggagcaccccgtcgaaaatactcaactccagaatgaaaagctctacctctactacctccaaaacggcagggatatgtacgtcgaccaagagctcgacattaatcgcctctccgactacgacgtcgatcacatcgtcccccagagtttcctcaaggacgactccatcgacaacaaggtcctcaccagatccgataaaaatcgcggaaagtccgacaacgtcccctctgaggaagtggttaagaagatgaaaaactactggagacagctcctcaacgcaaagctgatcacccagcgcaagttcgacaacctcacaaaggctgagagagggggactctctgagttggacaaggccggcttcatcaagagacaactcgtggaaacccgccagatcaccaagcatgtcgcacagattctcgactcccgcatgaatactaaatacgatgaaaatgacaagctcatcagggaggtcaaggtcatcaccctgaagtccaagctcgtctccgacttccgcaaggacttccagttctacaaggtccgcgagatcaacaactaccaccacgcccacgacgcatacctcaacgctgtggttggaacagcactcatcaagaagtaccccaagctcgagtccgagttcgtctacggcgactacaaggtctacgacgtcaggaagatgatcgccaagtccgagcaagagatcggaaaggccaccgcaaaatatttcttctactccaacataatgaacttcttcaaaaccgagatcaccctggctaacggagaaataaggaagaggcccctgatagaaaccaacggcgagacaggcgagattgtctgggacaaaggcagggacttcgcaaccgtcagaaaggtgctcagtatgcctcaggtcaacatagtcaaaaagaccgaagtccagactggaggattctccaaggagtccatcctccccaaaaggaactccgacaaactgatcgccaggaaaaaggactgggaccccaaaaaatatggcggcttcgactcccctactgttgcttacagtgtgctcgtcgtcgcaaaagtcgagaaggggaaatccaagaagctcaagtcagtgaaggagctcctcggcatcaccatcatggagaggtcctccttcgagaagaaccccatcgacttcctcgaggccaagggatataaggaggtcaagaaggacctcatcattaaactccccaagtactccctcttcgagctcgaaaacggacgcaagaggatgctcgcttcagctggtgaactccagaagggcaacgaactcgctttgccctctaaatacgtcaacttcctctacctcgcctcccactatgaaaagctcaagggctccccagaggacaacgagcagaagcaactcttcgtcgagcagcacaagcattacctcgacgagatcatcgagcagatctccgagttctccaagagagtcatcctcgctgacgcaaacctcgacaaggtcctcagtgcatataacaagcaccgcgacaaaccaataagggagcaggccgaaaatattatacacctgttcaccctcaccaacttgggagcaccagccgccttcaagtatttcgacaccaccatcgacagaaagcgctacacctccacaaaggaggtcctggacgccacacttatccaccagtccatcaccggcctctatgaaacacgcatcgacctctctcaattgggaggggacaagagaccaagagacagacacgatggagagcttggaggtagaaagagagcaaggtagttcgaactggccaggtaccgttaacctagacttgtccatcttctggattggccaacttaattaatgtatgaaataaaaggatgcacacatagtgacatgctaatcactataatgtgggcatcaaagttgtgtgttatgtgtaattactagttatctgaataaaagagaaagagatcatccatatttcttatcctaaatgaatgtcacgtgtctttataattctttgatgaaccagatgcatttcattaaccaaatccatatacatataaatattaatcatatataattaatatcaattgggttagcaaaacaaatctagtctaggtgtgttttgcaagcttggcgcgccgttaacttaacggcaaacgctaattagtcactaggcccaggaaacactaactaagccctagcttatcctagcgcaacctagttaggtcttggtaacccgagatatcgatgcggccgccgctccgggtgattgcggttacatcatgtacggaaaaataattctaatccttgatttaaatttgaacttgactatttatttattctttatttcattttgtaaatcattttatgtatctcctggcaagcaattttatccaccttgcaccaacaccttcgggttccataatcaaaccaccttaacttcacaccatgctgtaactcacaccgcccagcatctccaatgtgaaagaagctaaaatttaataaacaatcatacgaagcagtgacaaaataccagatggtattaatgcttcgataaaattaattggaaagtataaaatggtagaaaataataaattataattaatttaagtaagataaaaaataattaaaaactaaaatgttaaaattttaaaaaaattattttaaataatatttaaaaacattaaaaatcattttaaaaaatttatttatagaacaattaaataaatatttcagctaataaaaaacaaaagcttacctagccttagaagacaacttgtccaacaattagatgatacccattgcccttacgttttctttaacatcaattattgtttttgtcaacaagctatcttttagttttattttattggtaaaaaatatgtcgccttcaagttgcatcatttaacacatctcgtcattagaaaaataaaactcttccctaaacgattagtagaaaaaatcattcgataataaataagaaagaaaaattagaaaaaaataacttcattttaaaaaaatcattaaggctatattttttaaatgactaattttatatagactgtaactaaaagtatacaatttattatgctatgtatcttaaagaattacttataaaaatctacggaagaatatcttacaaagtgaaaaacaaatgagaaagaatttagtgggatgattatgattttatttgaaaattgaaaaaataattattaaagactttagtggagtaagaaagctttcctattagtcttttcttatccataaaaaaaaaaaaaaaaatctagcgtgacagcttttccatagattttaataatgtaaaatactggtagcagccgaccgttcaggtaatggacactgtggtcctaacttgcaacgggtgcgggcccaatttaataacgccgtggtaacggataaagccaagcgtgaagcggtgaaggtacatctctgactccgtcaagattacgaaaccgtcaactacgaaggactccccgaaatatcatctgtgtcataaacaccaagtcacaccatacatgggcacgcgtcacaatatgattggagaacggttccaccgcatatgctataaaatgcccccacacccctcgaccctaatcgcacttcaattgcaatcaaattagttcattctctttgcgcagttccctacctctcctttcaaggttcgtagatttcttccgtttttttttcttcttctttattgtttgttctacatcagcatgatgttgatttgattgtgttttctatcgtttcatcgattataaattttcataatcagaagattcagcttttattaatgcaagaacgtccttaattgatgattttataaccgtaaattaggtctaattagagtttttttcataaagattttcagatccgtttacaacaagccttaattgttgattctgtagtcgtagattaaggtttttttcatgaactacttcagatccgttaaacaacagccttatttgttgatacttcagtcgtttttcaagaaattgttcagatccgttgataaaagccttattcgttgattctgtatggtatttcaagagatattgctcaggtcctttagcaactaccttatttgttgattctgtggccatagattaggattttttttcacgaaattgcttcttgaaattacgtgatggattttgattctgatttatcttgtgattgttgactctacagccatggcccacagcaagcacggcctgaaggaggagatgaccatgaagtaccacatggagggctgcgtgaacggccacaagttcgtgatcaccggcgagggcatcggctaccccttcaagggcaagcagaccatcaacctgtgcgtgatcgagggcggccccctgcccttcagcgaggacatcctgagcgccggcttcaagtacggcgaccggatcttcaccgagtacccccaggacatcgtggactacttcaagaacagctgccccgccggctacacctggggccggagcttcctgttcgaggacggcgccgtgtgcatctgtaacgtggacatcaccgtgagcgtgaaggagaactgcatctaccacaagagcatcttcaacggcgtgaacttccccgccgacggccccgtgatgaagaagatgaccaccaactgggaggccagctgcgagaagatcatgcccgtgcctaagcagggcatcctgaagggcgacgtgagcatgtacctgctgctgaaggacggcggccggtaccggtgccagttcgacaccgtgtacaaggccaagagcgtgcccagcaagatgcccgagtggcacttcatccagcacaagctgctgcgggaggaccggagcgacgccaagaaccagaagtggcagctgaccgagcacgccatcgccttccccagcgccctggcctgagagctcgaatttccccgatcgttcaaacatttggcaataaagtttcttaagattgaatcctgttgccggtcttgcgatgattatcatataatttctgttgaattacgttaagcatgtaataattaacatgtaatgcatgacgttatttatgagatgggtttttatgattagagtcccgcaattatacatttaatacgcgatagaaaacaaaatatagcgcgcaaactaggataaattatcgcgcgcggtgtcatctatgttactagatcgggaattctagtggccggcccagctgatatctagacccagctttcttgtacaaagtggcccggggcggccgaagctggccttctaggcccggaccgggtgaccaagcttggcgcgcccagggcccatcgatatcggtacctacgcgttcgaatatccatggatccgaattccgcggccgcttggtaacccggtccgggccattctggccgatccgttaacgcccgggcaactttattatacaaagttgatggtacggatccgtcgacggcgcgccgcggacctgaattccagcacactggcggccgttactagtaacggccgccagtgtgctggaattcgcccttcccaagctttgctctagatcaaactcacatccaaacataacatggatatcttccttaccaatcatactaattattttgggttaaatattaatcattatttttaagatattaattaataagtgactagggtcacgtgaccctagtcacttatgattccgatgacttcgtaggttcctagctcaagccgctcgtgtccaagcgtcacttacgattagctaatgattacggcatctaggaccgactagttcttatgtgcttctagtctccaaatgtggttgatagttattttgctctaagatcaacagtaatgaagtataaatcatcgttgtggtgtgctactcggttaattgagcattaacacacacaaacatgacgaggatggtataatctccaaaaatgtgtactttgttaggtgggaccctatagccttgattaatgtgctatgttaggcatgcctggaaacgtgtgacgcatatgttttgtgaacctgttgatattatatgtgcttttatattaccatattttattaaaatactaatatttattactagtaagatataacattctatctagcttaaaaactaaccataaatattccataataactagatttaccaaactaatatactaaatatacataataaatacaaaattaacaagacaataatcaatatttatgagcttaatatatttagacattatggttggtcgacgataatcatgctaacttttcgtaattgcttgattgaaatatgcttagaataatgcctctttgttctacatggcaaatagggaccattatggtgtaacaccctgggaaccacaaacaccccgaaatgctactaaactacacaactaaccttcatatataaaatttcgacagcatctcctttgaaaatttgcatagacgtggaagcaacagagtataaacagatctagctagctaagtttctagctagctaagtttaaacggccggccaaacgtgcaagcgctactagacaattcagtacattaaaaacgtccgcaatgtgttattaagttgtctaagcgtcaatttatttacaattgaatatatcctgccaccagccagccaacagctccccgaccggcagctcggcacaaaatcaccactcgatacaggcagcccatcagtccgggacggcgtcagcgggagagccgttgtaaggcggcagactttgctcatgttaccgatgctattcggaagaacggcaactaagctgccgggtttgaaacacggatgatctcgcggagggtagcatgttgattgtaacgatgacagagcgttgctgcctgtgatcaaatatcatctccctcgcagagatccgaattatcagccttcttattcatttctcgcttaaccgtgacaggcgcgcgcggtgccacctgggtccttttcatcacgtgctataaaaataattataatttaaattttttaatataaatatataaattaaaaatagaaagtaaaaaaagaaattaaagaaaaaatagtttttgttttccgaagatgtaaaagactctagggggatcgccaacaaatactaccttttatcttgctcttcctgctctcaggtattaatgccgaattgtttcatcttgtctgtgtagaagaccacacacgaaaatcctgtgattttacattttacttatcgttaatcgaatgtatatctatttaatctgcttttcttgtctaataaatatatatgtaaagtacgctttttgttgaaattttttaaacctttgtttatttttttttcttcattccgtaactcttctaccttctttatttactttctaaaatccaaatacaaaacataaaaataaataaacacagagtaaattcccaaattattccatcattaaaagatacgaggcgcgtgtaagttacaggcaagcgatccgtcctaagaaaccattattatcatgacattaacctataaaaataggcgtatcacgaggccctttcgtctcgcgcgtttcggtgatgacggtgaaaacctctgacacatgcagctcccggagacggtcacagcttgtctgtaagcggatgccgggagcagacaagcccgtcagggcgcgtcagcgggtgttggcgggtgtcggggctggcttaactatgcggcatcagagcagattgtactgagagtgcaccataccacagcttttcaattcaattcatcattttttttttattcttttttttgatttcggtttctttgaaatttttttgattcggtaatctccgaacagaaggaagaacgaaggaaggagcacagacttagattggtatatatacgcatatgtagtgttgaagaaacatgaaattgcccagtattcttaacccaactgcacagaacaaaaacctgcaggaaacgaagataaatcatgtcgaaagctacatataaggaacgtgctgctactcatcctagtcctgttgctgccaagctatttaatatcatgcacgaaaagcaaacaaacttgtgtgcttcattggatgttcgtaccaccaaggaattactggagttagttgaagcattaggtcccaaaatttgtttactaaaaacacatgtggatatcttgactgatttttccatggagggcacagttaagccgctaaaggcattatccgccaagtacaattttttactcttcgaagacagaaaatttgctgacattggtaatacagtcaaattgcagtactctgcgggtgtatacagaatagcagaatgggcagacattacgaatgcacacggtgtggtgggcccaggtattgttagcggtttgaagcaggcggcagaagaagtaacaaaggaacctagaggccttttgatgttagcagaattgtcatgcaagggctccctatctactggagaatatactaagggtactgttgacattgcgaagagcgacaaagattttgttatcggctttattgctcaaagagacatgggtggaagagatgaaggttacgattggttgattatgacacccggtgtgggtttagatgacaagggagacgcattgggtcaacagtatagaaccgtggatgatgtggtctctacaggatctgacattattattgttggaagaggactatttgcaaagggaagggatgctaaggtagagggtgaacgttacagaaaagcaggctgggaagcatatttgagaagatgcggccagcaaaactaaaaaactgtattataagtaaacgcgcgcgggcgcgccttttcagcctgatacagattaaatcagaacgcagaagcggtctgataaaacagaatttgcctggcggcagtagcgcggtggtcccacctgaccccatgccgaactcagaagtgaaacgccgtagcgccgatggtagtgtggggtctccccatgcgagagtagggaactgccaggcatcaaataaaacgaaaggctcagtcgaaagactgggcctttcgttttatctgttgtttgtcggtgaacgctctcctgagtaggacaaatccgccgggagcggatttgaacgttgcgaagcaacggcccggagggtggcgggcaggacgcccgccataaactgccaggcatcaaattaagcagaaggccatcctgacggatggcctttttgcgtttctacaaactcttaccgcacccggagcgggcgcgaggccgccaaggcccgaggcgtgaagtttggcccccgccctaccctcaccccggcacagatcgcgcacgcccgcgagctgatcgaccaggaaggccgcaccgtgaaagaggcggctgcactgcttggcgtgcatcgctcgaccctgtaccgcgcacttgagcgcagcgaggaagtgacgcccaccgaggccaggcggcgcggtgccttccgtgaggacgcattgaccgaggccgacgccctggcggccgccgagaatgaacgccaagaggaacaagcatgaaaccgcaccaggacggccaggacgaaccgtttttcattaccgaagagatcgaggcggagatgatcgcggccgggtacgtgttcgagccgcccgcgcacgtctcaaccgtgcggctgcatgaaatcctggccggtttgtctgatgccaagctggcggcctggccggccagcttggccgctgaagaaaccgagcgccgccgtctaaaaaggtgatgtgtatttgagtaaaacagcttgcgtcatgcggtcgctgcgtatatgatgcgatgagtaaataaacaaatacgcaaggggaacgcatgaaggttatcgctgtacttaaccagaaaggcgggtcaggcaagacgaccatcgcaacccatctagcccgcgccctgcaactcgccggggccgatgttctgttagtcgattccgatccccagggcagtgcccgcgattgggcggccgtgcgggaagatcaaccgctaaccgttgtcggcatcgaccgcccgacgattgaccgcgacgtgaaggccatcggccggcgcgacttcgtagtgatcgacggagcgccccaggcggcggacttggctgtgtccgcgatcaaggcagccgacttcgtgctgattccggtgcagccaagcccttacgacatatgggccaccgccgacctggtggagctggttaagcagcgcattgaggtcacggatggaaggctacaagcggcctttgtcgtgtcgcgggcgatcaaaggcacgcgcatcggcggtgaggttgccgaggcgctggccgggtacgagctgcccattcttgagtcccgtatcacgcagcgcgtgagctacccaggcactgccgccgccggcacaaccgttcttgaatcagaacccgagggcgacgctgcccgcgaggtccaggcgctggccgctgaaattaaatcaaaactcatttgagttaatgaggtaaagagaaaatgagcaaaagcacaaacacgctaagtgccggccgtccgagcgcacgcagcagcaaggctgcaacgttggccagcctcgcagacacgccagccatgaagcgggtcaactttcagttgccggcggaggatcacaccaagctgaagatgtacgcggtacgccaaggcaagaccattaccgagctgctatctgaatacatcgcgcagctaccagagtaaatgagcaaatgaataaatgagtagatgaattttagcggctaaaggaggcggcatggaaaatcaagaacaaccaggcaccgacgccgtggaatgccccatgtgtggaggaacgggcggttggccaggcgtaagcggctgggttgcctgccggccctgcaatggcactggaacccccaagcccgaggaatcggcgtgagcggtcgcaaaccatccggcccggtacaaatcggcgcggcgctgggtgatgacctggtggagaagttgaaggcagcgcaggccgcccagcggcaacgcatcgaggcagaagcacgccccggtgaatcgtggcaagcagccgctgatcgaatccgcaaagaatcccggcaaccgccggcagccggtgcgccgtcgattaggaagccgcccaagggcgacgagcaaccagattttttcgttccgatgctctatgacgtgggcacccgcgatagtcgcagcatcatggacgtggccgttttccgtctgtcgaagcgtgaccgacgagctggcgaggtgatccgctacgagcttccagacgggcacgtagaggtttccgcagggccggcaggcatggccagtgtgtgggattacgacctggtactgatggcggtttcccatctaaccgaatccatgaaccgataccgggaagggaagggagacaagcccggccgcgtgttccgtccacacgttgcggacgtactcaagttctgccggcgagccgatggcggaaagcagaaagacgacctggtagaaacctgcattcggttaaacaccacgcacgttgccatgcagcgtacgaagaaggccaagaacggccgcctggtgacggtatccgagggtgaagccttgattagccgctacaagatcgtaaagagcgaaaccgggcggccggagtacatcgagatcgagctagctgattggatgtaccgcgagatcacagaaggcaagaacccggacgtgctgacggttcaccccgattactttttgatcgatcccggcatcggccgttttctctaccgcctggcacgccgcgccgcaggcaaggcagaagccagatggttgttcaagacgatctacgaacgcagtggcagcgccggagagttcaagaagttctgtttcaccgtgcgcaagctgatcgggtcaaatgacctgccggagtacgatttgaaggaggaggcggggcaggctggcccgatcctagtcatgcgctaccgcaacctgatcgagggcgaagcatccgccggttcctaatgtacggagcagatgctagggcaaattgccctagcaggggaaaaaggtcgaaaaggtctctttcctgtggatagcacgtacattgggaacccaaagccgtacattgggaaccggaacccgtacattgggaacccaaagccgtacattgggaaccggtcacacatgtaagtgactgatataaaagagaaaaaaggcgatttttccgcctaaaactctttaaaacttattaaaactcttaaaacccgcctggcctgtgcataactgtctggccagcgcacagccgaagagctgcaaaaagcgcctacccttcggtcgctgcgctccctacgccccgccgcttcgcgtcggcctatggcgcgccggaaaatatgcatggcatgcccgttccatacagaagctgggcgaacaaacgatgctcgccttccagaaaaccgaggatgcgaaccacttcatccggggtcagcaccaccggcaagcgccgcgacggccgaggtcttccgatctcctgaagccagggcagatccgtgcacagcaccttgccgtagaagaacagcaaggccgccaatgcctgacgatgcgtggagaccgaaaccttgcgctcgttcgccagccaggacagaaatgcctcgacttcgctgctgcccaaggttgccgggtgacgcacaccgtggaaacggatgaaggcacgaacccagtggacataagcctgttcggttcgtaagctgtaatgcaagtagcgtatgcgctcacgcaactggtccagaaccttgaccgaacgcagcggtggtaacggcgcagtggcggttttcatggcttgttatgactgtttttttggggtacagtctatgcctcgggcatccaagcagcaagcgcgttacgccgtgggtcgatgtttgatgttatggagcagcaacgatgttacgcagcagggcagtcgccctaaaacaaagttaaacatcatgagggaagcggtgatcgccgaagtatcgactcaactatcagaggtagttggcgtcatcgagcgccatctcgaaccgacgttgctggccgtacatttgtacggctccgcagtggatggcggcctgaagccacacagtgatattgatttgctggttacggtgacggtaaggcttgatgaaacaacgcggcgagctttgatcaacgaccttttggaaacttcggcttcccctggagagagcgagattctccgcgctgtagaagtcaccattgttgtgcacgacgacatcattccgtggcgttatccagctaagcgcgaactgcaatttggagaatggcagcgcaatgacattcttgcaggtatcttcgagccagccacgatcgacattgatctggctatcttgctgacaaaagcaagagaacatagcgttgccttggtaggtccagcggcggaggaactctttgatccggttcctgaacaggatctatttgaggcgctaaatgaaaccttaacgctatggaactcgccgcccgactgggctggcgatgagcgaaatgtagtgcttacgttgtcccgcatttggtacagcgcagtaaccggcaaaatcgcgccgaaggatgtcgctgccgactgggcaatggagcgcctgccggcccagtatcagcccgtcatacttgaagctagacaggcttatcttggacaagaagaagatcgcttggcctcgcgcgcagatcagttggaagaatttgtccactacgtgaaaggcgagatcaccaaggtagtcggcaaataatgtctaacaattcgttcaagccgacgccgcttcgcggcgcggcttaactcaagcgttagatgcactatacgtaaccaactagtaggaacagtgaattggagttcgtcttgttataattagcttcttgggggatctttaaatactgtagaaaagaggaaggaaataataaatggctaaaatgagaatatcaccggaattgaaaaaactgatcgaaaaataccgctgcgtaaaagatacggaaggaatgtctcctgctaaggtatataagctggtgggagaaaatgaaaacctatatttaaaaatgacggacagccggtataaagggaccacctatgatgtggaacgggaaaaggacatgatgctatggctggaaggaaagctgcctgttccaaaggtcctgcactttgaacggcatgatggctggagcaatctgctcatgagtgaggccgatggcgtcctttgctcggaagagtatgaagatgaacaaagccctgaaaagattatcgagctgtatgcggagtgcatcaggctctttcactccatcgacatatcggattgtccctatacgaatagcttagacagccgcttagccgaattggattacttactgaataacgatctggccgatgtggattgcgaaaactgggaagaagacactccatttaaagatccgcgcgagctgtatgattttttaaagacggaaaagcccgaagaggaacttgtcttttcccacggcgacctgggagacagcaacatctttgtgaaagatggcaaagtaagtggctttattgatcttgggagaagcggcagggcggacaagtggtatgacattgccttctgcgtccggtcgatcagggaggatatcggggaagaacagtatgtcgagctattttttgacttactggggatcaagcctgattgggagaaaataaaatattatattttactggatgaattgttttagtacctagatacttcgctcgtgaaaagcagcgctcagggggctagtgcgctcttccgcttcctcgctcactgactcgctgcgctcggtcgttcggctgcggcgagcggtatcagctcactcaaaggcggtaatacggttatccacagaatcaggggataacgcaggaaagaacatgtgagcaaaaggccagcaaaaggccaggaaccgtaaaaaggccgcgttgctggcgtttttccataggctccgcccccctgacgagcatcacaaaaatcgacgctcaagtcagaggtggcgaaacccgacaggactataaagataccaggcgtttccccctggaagctccctcgtgcgctctcctgttccgaccctgccgcttaccggatacctgtccgcctttctcccttcgggaagcgtggcgctttctcatagctcacgctgtaggtatctcagttcggtgtaggtcgttcgctccaagctgggctgtgtgcacgaaccccccgttcagcccgaccgctgcgccttatccggtaactatcgtcttgagtccaacccggtaagacacgacttatcgccactggcagcagccactggtaacaggattagcagagcgaggtatgtaggcggtgctacagagttcttgaagtggtggcctaactacggctacactagaagaacagtatttggtatctgcgctctgctgaagccagttaccttcggaaaaagagttggtagctcttgatccggcaaacaaaccaccgctggtagcggtggtttttttgtttgcaagcagcagattacgcgcagaaaaaaaggatctcaagaagatcctttgatcttttctacggggtctgacgctcagtggaacgaaaactcacgttaagggattttggtcatgagattatcaaaaaggatcttcacctagatccttttaaattaaaaatgaagcgtacgttggaatcgcttctacaaaa

SEQ ID NO: 105 - DNA, 32777 bp, Artificial Sequence
  Nucleotide sequence of Vector 17
ctcacagaaacaatcaaacaaacatacacagcgatttattcacacgaacccgaattacaacggtatatatcctgtcagccaacaccaaaacatcaaaaaaatcgggatcaggatcaggatctgcggccgcatcctgcaggagctcaaacgagcaggaagcaacgagagggtggcgcgcgaccgacgtgcgtacgtagcatgagcctgagtggagacgttggacgtgtatgtatatacctctctgcgtgttaactatgtacgtaagcggcaggcagtgcaataagtgtggctctgtagtatgtacgtgcgggtacgatgctgtaagctactgaggcaagtccataaataaataatgacacgtgcgtgttctataatctcttcgcttcttcatttgtccccttgcggagtttggcatccattgatgccgttacgctgagaacagacacagcagacgaaccaaaagtgagttcttgtatgaaactatgacccttcatcgctaggctcaaacagcaccccgtacgaacacagcaaattagtcatctaactattagcccctacatgtttcagacgatacataaatatagcccatccttagcaattagctattggccctgcccatcccaagcaatgatctcgaagtatttttaatatatagtatttttaatatgtagcttttaaaattagaagataattttgagacaaaaatctccaagtatttttttgggtattttttactgcctccgtttttctttatttctcgtcacctagtttaattttgtgctaatcggctataaacgaaacagagagaaaagttactctaaaagcaactccaacagattagatataaatcttatatcctgcctagagctgttaaaaagatagacaactttagtggattagtgtatgcaacaaactctccaaatttaagtatcccaactacccaacgcatatcgttcccttttcattggcgcacgaactttcacctgctatagccgacgtacatgttcgttttttttgggcggcgcttactttcttccccgttcgttctcagcatcgcaactcaatttgttatggcggagaagcccttgtatcccaggtagtaatgcacagatatgcattattattattcataaaacgaacgctcttcaactggaagagcggttactaccggttcactagctagctgctaatcgagctagttaccctatgaggtgacatgaagcgctcacggttactatgacggttagcttcacgactgttggtggcagtagcgtacgacttagctatagttccggacttacctagctaggttaccccgggcaatcaaattatatatgtaaagcaattacagtttatcaaactttatttatggaaataatttattatcacatttattttggtttataaattttaaattaaaatatcacctaaataaaaataatttttaacatgacttattgtcctaaataaattatttccgtaaattaaataaaatgaagtttttttctttcaaagaatctaaatggtcataatgagaattctctaaaaaaatacataatgagaataattatggaatttatttattaataaaaattaatagcattttgatagacaattaataaaattttaaaaataaccatatagaaataataatttttttactatcggttccaattaaaataatgataaaaaataaaatagattattaattgatattgatatgaaatttaaataaagaatataatcatatattttattgatatatgatatgatatagattaattgatattgattttgatatggaatttaaaaataatataataattgtttttatttattaatacgtgtaatcaaataattctcactttttgaatcaatcagtgtacttaaagataatatcagttgaatattttttatccttttacgtgtgctgtgagacattatcatcaattgtgttgtatatgatatatagatatagatatataaatatatagattgagtgatataatatatttaaaatataaattatatatatgttttaatatatttttgcatatatatatatatttgtaaaaactagaagtattttttcatgagataattattatcgagttgaataagtctattatttgtgagagccaaccatatttatatatgtgattaaattttatctttgtgaaattaaaaataataaaaaataccttaaaatcataataatagaaaaacttatatttataatttaccattatacttaaaaaaaattaaataaatattataaatataaatactatcgagtaatggccgcgctagggtttttgagaaaaaatcttcccacgcactcaactgcactgtacggcgtcgttttcacagccgcataatagaagccgcgttccccaacccttcctcacaacattctcggaccctccagcaccgtcacccaaacaaatatccacgcggtagtaggcgcgtgaaacaaactctaatccgaactacgagacgtgagaagcacgcgctttagcgagcgtttcaattgtcgctacgaaagcagagaaggatacaaacggaactagggtaaattagtaagggtaatttcgtaaacagaagaaaagagttgtagctataaataaaccctctaaccctcgtcgcattacttctcttcacacctttgttcactcttcttctcttgcggctagggttttagcgcagcttcttctaggttcgttatctaccaccgttctatggattttattccttctattcgtgtttattctattggtttatgttgcttgcaatatgttttttctgaatctgtcgtcgttgtcttcaattttatccatgtttcagagatcaattttgtttgtgtagtatgtgcttattcttcttcttttcgttcgagttgttaataacggtgctatggtgttttcaaaagtgttttttttattacttttgatttaaagtttttttggtaaggcttttatttgcttgttatattcaaatctttggatccagatcttatataagtttttggttcaagaaagtttttggttactgatgaatagatctattaactgttactttaatcgattcaagctaaagttttttggttactgatgaatagatctattatctgttacttttaatcggttcaagctcaagttttttggttactgatgaatagatctatatacgtcacagtgtgctaaacatgcccttgttttatctcgatcttatgtatgggagtgccataaattttgttatgtctatttttttatctgttggaatcatactgagtttgatgcgttacgattgagcatacctatttttgggcttgttgtatggtgggtatttagatcttaatctttttatgcttatgaaaggttttgtaatgacaaaggtcttaatgttgttaaacttttatttttactttatatggtgtgttgatgtgttatggttttgacaactttttttttttctggatttttgcagatttaaggaagggtgctaagcacgacatccatggagcctcctcagcaccaacatcaccaccatcaggccgatcaagagtccgggaacaacaacaacaacaagtccggttccggagggtacacttgcagacagacctccaccagatggacacctaccactgagcagatcaagatcctgaaggagttgtactacaacaatgccatccgctcccctactgctgatcagattcagaagatcaccgctcgcctgcgtcaattcggtaagatcgagggtaagaacgtcttctactggttccagaaccacaaggctcgtgagaggcagaagaagcgtttcaacgggactaacatgaccactccttcctcatcacccaattctgttatgatggccgccaacgaccactaccatcctttgcttcatcaccaccacggagttcctatgcaaagacccgcaaactccgtcaacgtgaagttgaaccaggaccatcacctctaccaccacaacaagccctacccctctttcaacaacgggaatctcaaccatgcctcctctggaaccgaatgtggagttgtcaacgcctccaacggctacatgtcttcccacgtgtacggctctatggagcaagattgctccatgaactacaacaacgttggaggcggatgggcaaacatggatcaccactactcctccgctccctacaacttcttcgatagggctaaacctctcttcggcttggagggacaccaagaagaagaggaatgcggaggtgatgcttacttggaacacagaaggactctccctctctttccaatgcacggtgaggaccacatcaacggaggatctggcgctatctggaagtatggacagtccgaggtcagaccatgcgcttccctggaattgagactgaactagattgggacctaggaaacttatctctgttatgaatcagaagaagttcatgtctcgtttcatttaaaactttggtggtttgtgttttggggccttgtaaagcccctgatgaataattgttcaactatgtttccgttcctgtgttatacctttctttctaatgagtaatgacatcaaacttcttctgtattgaaattatgtccttgtgagtctctttatcatcgtttcgtctttacattatatgtgctacttttgtctaatgagcctgaaaagtggctccaatggtacgcactggaagatttgttggcttctggtagatatagcgacagtgttgagcttgtaatatcatgtctcttattgctaaattagttcctttcttaacagaaaccttcaaagtttttgtttttgttttcatttacctaatgtacacatacgctggccatgactaacaacatgtccaggcttagagcatatttttttctagcttaaattgttaacttgtcattcagtaaaatccgagaattgtgaagctctaattgaagctaattcgttttataaagtcagttaaaaagtatactaaattatccaacttttcttcaaaatctcaaaattctatgacaaaacgatagtctttgtttatgtcagtaccacaaagaggtggaaaaaaacaccaaaaaaacaataagcaaactatacactgagaagaaaaataaaagagagctcaatagatgttttatactaacggtagattagatcaaagatccaagctttactctacatagagcagaacccagaatcccttcatatctcttttattctagcaccgataatctactgaaaagaagacacttagagctctgtctctttgtcaaagaagtcccagccgtcatccagaagctccttacgttcattaacagaggtaccggcggccgggggctcggcgttaggcttttagtccgctaggtggctagaccgaggttaggacgctagttcactaggggcctagtggtgttttaaggatggcgaccccagtgatggcaactaagtggatcaacagcaacttttgctccgatttgcgatataatttgtcaaaacatgcctctaaaatcactctaacatcaaatttcttgaataacaattttatacactcccctcctccaacttgttatgtgcccttctgacccttcttgttttgtttgctagttaaccatgtaggaaaaagtatcactccactcaatagtattttcacttcatctggccataaataattttggcctaattcagcatcacgtatcaggagtcaataagcttgtctgtccgtctgtatttatcatctctcttcgtgctactatcacctccccttttcttatggatttttcctgttaaaaaacaaaaaggaacaggtaacccacttgaattaggacaccaatgtaggtgccaccacccgtttccttctgttgagtgtgcacgcttattggttcaacctcagaattaaattcttcataatcccctgttgagagaaaattataatagacaaatcaaattgtgtggacttgccatttcccaaaacattttcattttgtgcgcgtgtgggtggtggggtgcgttttattagaatgaagactgtaaaaaagaggagtgtaggatgataagaagtagtaaatgtcagttgtcaaaagatgaaaagcaacggaggaagggaccaaaccttgacctatggaaaactgagtgctatggtaattattgtcacaggatttaggatgattaataatagttcggaccacaaataaacagctttaagaagttcaactttcccccacggatagcaaatttggttggaccatctttgatgaaagtccccaatctcataattgccaaccttttttatacgaaactagtattttcataattatcaagaatcttcaactcatcagtgatcgctcatttctgattaagaaaaaaaaagggtgagtaaatgaatccattttgtctgttctccatggcccgggtaccctgggatccgatatcgatgggccctggccggtgaccaagcttggcgcgcccagggccgccagtgtgatggatatctcgacccgggtgattgcggttacatcatgtacggaaaaataattctaatccttgatttaaatttgaacttgactatttatttattctttatttcattttgtaaatcattttatgtatctcctggcaagcaattttatccaccttgcaccaacaccttcgggttccataatcaaaccaccttaacttcacaccatgctgtaactcacaccgcccagcatctccaatgtgaaagaagctaaaatttaataaacaatcatacgaagcagtgacaaaataccagatggtattaatgcttcgataaaattaattggaaagtataaaatggtagaaaataataaattataattaatttaagtaagataaaaaataattaaaaactaaaatgttaaaattttaaaaaaattattttaaataatatttaaaaacattaaaaatcattttaaaaaatttatttatagaacaattaaataaatatttcagctaataaaaaacaaaagcttacctagccttagaagacaacttgtccaacaattagatgatacccattgcccttacgttttctttaacatcaattattgtttttgtcaacaagctatcttttagttttattttattggtaaaaaatatgtcgccttcaagttgcatcatttaacacatctcgtcattagaaaaataaaactcttccctaaacgattagtagaaaaaatcattcgataataaataagaaagaaaaattagaaaaaaataacttcattttaaaaaaatcattaaggctatattttttaaatgactaattttatatagactgtaactaaaagtatacaatttattatgctatgtatcttaaagaattacttataaaaatctacggaagaatatcttacaaagtgaaaaacaaatgagaaagaatttagtgggatgattatgattttatttgaaaattgaaaaaataattattaaagactttagtggagtaagaaagctttcctattagtcttttcttatccataaaaaaaaaaaaaaaaatctagcgtgacagcttttccatagattttaataatgtaaaatactggtagcagccgaccgttcaggtaatggacactgtggtcctaacttgcaacgggtgcgggcccaatttaataacgccgtggtaacggataaagccaagcgtgaagcggtgaaggtacatctctgactccgtcaagattacgaaaccgtcaactacgaaggactccccgaaatatcatctgtgtcataaacaccaagtcacaccatacatgggcacgcgtcacaatatgattggagaacggttccaccgcatatgctataaaatgcccccacacccctcgaccctaatcgcacttcaattgcaatcaaattagttcattctctttgcgcagttccctacctctcctttcaaggttcgtagatttcttccgtttttttttcttcttctttattgtttgttctacatcagcatgatgttgatttgattgtgttttctatcgtttcatcgattataaattttcataatcagaagattcagcttttattaatgcaagaacgtccttaattgatgattttataaccgtaaattaggtctaattagagtttttttcataaagattttcagatccgtttacaacaagccttaattgttgattctgtagtcgtagattaaggtttttttcatgaactacttcagatccgttaaacaacagccttatttgttgatacttcagtcgtttttcaagaaattgttcagatccgttgataaaagccttattcgttgattctgtatggtatttcaagagatattgctcaggtcctttagcaactaccttatttgttgattctgtggccatagattaggattttttttcacgaaattgcttcttgaaattacgtgatggattttgattctgatttatcttgtgattgttgactctacagccatggcccacagcaagcacggcctgaaggaggagatgaccatgaagtaccacatggagggctgcgtgaacggccacaagttcgtgatcaccggcgagggcatcggctaccccttcaagggcaagcagaccatcaacctgtgcgtgatcgagggcggccccctgcccttcagcgaggacatcctgagcgccggcttcaagtacggcgaccggatcttcaccgagtacccccaggacatcgtggactacttcaagaacagctgccccgccggctacacctggggccggagcttcctgttcgaggacggcgccgtgtgcatctgtaacgtggacatcaccgtgagcgtgaaggagaactgcatctaccacaagagcatcttcaacggcgtgaacttccccgccgacggccccgtgatgaagaagatgaccaccaactgggaggccagctgcgagaagatcatgcccgtgcctaagcagggcatcctgaagggcgacgtgagcatgtacctgctgctgaaggacggcggccggtaccggtgccagttcgacaccgtgtacaaggccaagagcgtgcccagcaagatgcccgagtggcacttcatccagcacaagctgctgcgggaggaccggagcgacgccaagaaccagaagtggcagctgaccgagcacgccatcgccttccccagcgccctggcctgagagctcgaatttccccgatcgttcaaacatttggcaataaagtttcttaagattgaatcctgttgccggtcttgcgatgattatcatataatttctgttgaattacgttaagcatgtaataattaacatgtaatgcatgacgttatttatgagatgggtttttatgattagagtcccgcaattatacatttaatacgcgatagaaaacaaaatatagcgcgcaaactaggataaattatcgcgcgcggtgtcatctatgttactagatcgggaattccgcggccgcttggtaaccgatatcatgtcgtgcttagcacgtgatgcatcatagatgcggtaaattattactttctgtgactgggacaatgtgctcctccagtggccacgtatcggtaaaccttgtgccagaacactaatatttatataatcaacaataaagaatggtaagcattagacaaagacaaaaacaatttttaataatttacctgtactaattagaaggggtttgatttaattttattaaacttaacatgtgcaatatgtccctttgtttagaggaaaacaattacggtatttccttactaacgtaaactctgaatataatcatacatctgtattctgaaaaagaaaaaagaactagagataaaagcgtagaaacaacagtatgtggtcatagtcatacacgtaaagggatgaaaattgaaaatagaacctgcaggaaataagtttgcatttaatttggatatatatcttgaagtgtaaggttaacctctcagctattaaatagtactactactaacactcaaatagtacttctactagcactcacggtaacaatctcttagtagggatgggaataggccagatcggcctacaggggtctacgacttgaggtgctaagcacgacatccatggcctagatggcctcctccgagaacgtcatcaccgagttcatgcgcttcaaggtgcgcatggagggcaccgtgaacggccacgagttcgagatcgagggcgagggcgagggccgcccctacgagggccacaacaccgtgaagctgaaggtgacgaagggcggccccctgcccttcgcctgggacatcctgtccccccagttccagtacggctccaaggtgtacgtgaagcaccccgccgacatccccgactacaagaagctgtccttccccgagggcttcaagtgggagcgcgtgatgaacttcgaggacggcggcgtggcgaccgtgacccaggactcctccctgcaggacggctgcttcatctacaaggtgaagttcatcggcgtgaacttcccctccgacggccccgtgatgcagaagaagaccatgggctgggaggcctccaccgagcgcctgtacccccgcgacggcgtgctgaagggcgagacccacaaggccctgaagctgaaggacggcggccactacctggtggagttcaagtccatctacatggccaagaagcccgtgcagctgcccggctactactacgtggacgccaagctggacatcacctcccacaacgaggactacaccatcgtggagcagtacgagcgcaccgagggccgccaccacctgttcctgtagttttgtgatctgatgataagtggttggttcgtgtctcatgcacttgggaggtgatctatttcacctggtgtagtttgtgtttccgtcagttggaaaaacttatccctatcgatttcgttttcattttctgcttttcttttatgtaccttcgtttgggcttgtaacgggcctttgtatttcaactctcaataataatccaagtgcatgttaaacaatttgtcatctgtttcggctttgatatactactggtgaagatgggccgtactactgcatcacaacgaaaaataataataagatgaaaaacttgaagtggaaaaaaaaaaaaacttgaatgttcactactactcattgaccataatgtttaacatacatagctcaatagtatttttgtgaatatggcaacacaaacagtccaaaacaattgtctcttactataccaaaccaagggcgccgcttgtttgccactctttgtgtgcaatagtgtgattaccacatctccacattcaatatattccctgaattatctgacgattttgatggctcactgttttcccaagtcttgaattgtcttctgtgcgccagtcaaatgcatatgtgttgagtttatcttttaaatatcaagcttttgtttttaacttttgtttgtaaccaaaaactcacagtaggagtttgatcacataattttatgtttgcctttgcaatttctagtgagtctttgattaaaagcttgaaaagaaaatgcagccaagcttaccaagtaagttatgtgtattaaccagaggaagagagaatcttgcaaaatttcaacaaacacaaaaagaagtattactacgattggtggagaaagaaaacgattccaaatcttgaactgttgttgtaaaagcatagcagaaagtgggagacaaccgaaatagaaatgactataacttaatttaatgttatcattataatttcttctagcaaatatttagaaagtaaatatcacatcaacctttaatgtaattaagctttctctttttgattcatgtgagatgaaaagaaaaaaaagaagagaaaagtgtagaaaacacatcatttctaagctgaaggtacccgggtgtgatttagtataaagtgaagtaatggtcaaaagaaaaagtgtaaaacgaagtacctagtaataagtaatattgaacaaaataaatggtaaagtgtcagatatataaaataggctttaataaaaggaagaaaaaaaacaaacaaaaaataggttgcaatggggcagagcagagtcatcatgaagctagaaaggctaccgatagataaactatagttaattaaatacattaaaaaatacttggatctttctcttaccctgtttatattgagacctgaaacttgagagagatacactaatcttgccttgttgtttcattccctaacttacaggactcagcgcatgtcatgtggtctcgttccccatttaagtcccacaccgtctaaacttattaaattattaatgtttataactagatgcacaacaacaaagcttggtgctaagcacgacatccagttttagagctagaaatagcaagttaaaataaggctagtccgttatcaacttgaaaaagtggcaccgagtcggtgcttttttttcggaccgggttaccagtctaaaaacggcccctaactaacgcttagttgcccgctagattagtcccccgttagtgcctagttagacacacgacgaactaggggctactagtagcggccgcaattggatcgggtttacttattttgtgggtatctatacttttattagatttttaatcaggctcctgatttctttttatttcgattgaattcctgaacttgtattattcagtagatcgaataaattataaaaagataaaatcataaaataatattttatcctatcaatcatattaaagcaatgaatatgtaaaattaatcttatctttattttaaaaaatcatataggtttagtatttttttaaaaataaagataggattagttttactattcactgcttattacttttaaaaaaatcataaaggtttagtatttttttaaaataaatataggaatagttttactattcactgctttaatagaaaaatagtttaaaatttaagatagttttaatcccagcatttgccacgtttgaacgtgagccgaaacgatgtcgttacattatcttaacctagctgaaacgatgtcgtcataatatcgccaaatgccaactggactacgtcgaacccacaaatcccacaaagcgcgtgaaatcaaatcgctcaaaccacaaaaaagaacaacgcgtttgttacacgctcaatcccacgcgagtagagcacagtaaccttcaaataagcgaatggggcataatcagaaatccgaaataaacctaggggcattatcggaaatgaaaagtagctcactcaatataaaaatctaggaaccctagttttcgttatcactctgtgctccctcgctctatttctcagtctctgtgtttgcggctgaggattccgaacgagtgaccttcttcgtttctcgcaaaggtaacagcctctgctcttgtctcttcgattcgatctatgcctgtctcttatttacgatgatgtttcttcggttatgtttttttatttatgctttatgctgttgatgttcggttgtttgtttcgctttgtttttgtggttcagttttttaggattcttttggtttttgaatcgattaatcggaagagattttcgagttatttggtgtgttggaggtgaatcttttttttgaggtcatagatctgttgtatttgtgttataaacatgcgactttgtatgattttttacgaggttatgatgttctggttgttttattatgaatctgttgagacagaaccatgatttttgttgatgttcgtttacactattaaaggtttgttttaacaggattaaaagttttttaagcatgttgaaggagtcttgtagatatgtaaccgtcgatagtttttttgtgggtttgttcacatgttatcaagcttaatcttttactatgtatgcgaccatatctggatccagcaaaggcgattttttaattccttgtgaaacttttgtaatatgaagttgaaattttgttattggtaaactataaatgtgtgaagttggagtatacctttaccttcttatttggctttgtgatagtttaatttatatgtattttgagttctgacttgtatttctttgaattgattctagtttaagtaatccatggcacctaaaaagaagaggaaagttatggacaaaaagtactccatagggctcgatatcggcacaaacagtgtggggtgggcagtcatcactgacgactacaaggtcccctccaagaagttcaaggtcctcggcaatacagaccgccactccatcaagaagaacctcatcggagcactgttgttcgactccggagaaactgccgaagcaaccagactcaagaggaccgccagaagaaggtacacaaggcgcaagaacaggatctgctacctccaggagatcttcagtaacgagatggcaaaggtcgacgactctttcttccacaggctcgaggaatccttcctcgtcgaggaggacaagaagcatgagagacaccccatcttcggaaacatcgtcgacgaggtaagtttctgcttctacctttgatatatatataataattatcattaattagtagtaatataatatttcaaatatttttttcaaaataaaagaatgtagtatatagcaattgcttttctgtagtttataagtgtgtatattttaatttataacttttctaatatatgaccaaaacatggtgatgtgcaggtcgcctaccacgagaagtacccaaccatctaccacctgaggaagaagctcgtcgacagtaccgacaaggctgacctcaggctcatctacctcgcactcgcccacatgattaagttcaggggccacttcctcatagagggagacctcaacccagacaactccgacgtcgacaaactcttcatccaactcgtgcagacctacaatcaactctttgaagagaacccaatcaacgcctccggagtggatgctaaggctatattgtccgccaggctctccaaatcaagacgcctcgaaaacctcatcgcccagctcccaggggagaagaaaaatagcctcttcgggaacctcatagccctgtcccttggactcacccctaacttcaaatcaaatttcgacctcgcagaggacgctaagcttcaactctccaaggacacctacgacgacgacctcgataacctcctcgcccaaatcggtgatcaatacgctgacctcttcctcgctgctaagaacctctccgacgccatactcctctccgacattctgagggtcaacaccgagatcacaaaggctcccttgtccgcctccatgattaaacgctacgacgaacaccaccaggacctcaccctcttgaaggcactggttagacagcagctccccgagaagtacaaggaaatcttcttcgaccaatcaaaaaacggctacgccggatacatcgacggaggagcatcccaggaagagttctacaagttcatcaaaccaattctcgaaaagatggacggaacagaggagctcttggtcaagctcaacagggaggacctcctcagaaagcagagaaccttcgacaacggcagtatcccccaccagatccaccttggagagttgcacgcaatcctcaggaggcaagaggacttctaccccttcctcaaggacaacagggagaagatcgagaagatccttacattccgcatcccctactacgtcggacctttggcaagaggaaactcccgcttcgcatggatgactcgcaagagtgaggaaaccatcaccccttggaacttcgaggaggtcgtcgataagggagcttcagcccagtccttcatcgagcgcatgaccaacttcgataaaaatctccccaatgaaaaagtcctccccaagcacagtctgctctacgagtacttcacagtctacaacgagctcaccaaggtcaagtacgtcaccgaaggcatgagaaaacccgccttcctcagtggcgagcagaagaaggcaatcgtggacttgctgttcaagaccaaccgcaaggtcacagtcaagcaattaaaagaggactacttcaagaaaatagagtgcttcgacagtgtcgagatctctggggtcgaggacaggttcaacgcatccttggggacctatcacgacctcctcaagatcattaaagacaaggacttcctcgacaacgaggagaacgaggacatactggaggacatcgtcctcaccctcactctctttgaggacagggagatgatagaggagcgcctcaaaacctacgcccacctcttcgacgacaaggtgatgaaacagctcaagaggcgcagatacaccggatggggtagactctccaggaagctgattaatggcatccgcgacaaacagtccggcaagaccatcctcgacttcctcaagagtgacggattcgccaaccgcaacttcatgcagctcatacacgacgactccctcaccttcaaggaggacatccaaaaagcccaagtctccggacagggagactcattgcacgaacacatcgccaacttggctggatctcctgctattaaaaagggcatcctccaaaccgtcaaggtggtcgacgaactcgtcaaggtcatgggtagacacaagcccgaaaatatcgtcatcgagatggcaagggagaaccagacaacccagaagggccaaaaaaactccagggagcgcatgaaacgcatcgaggagggaataaaggagctcgggtcccagatcctcaaggagcaccccgtcgaaaatactcaactccagaatgaaaagctctacctctactacctccaaaacggcagggatatgtacgtcgaccaagagctcgacattaatcgcctctccgactacgacgtcgatcacatcgtcccccagagtttcctcaaggacgactccatcgacaacaaggtcctcaccagatccgataaaaatcgcggaaagtccgacaacgtcccctctgaggaagtggttaagaagatgaaaaactactggagacagctcctcaacgcaaagctgatcacccagcgcaagttcgacaacctcacaaaggctgagagagggggactctctgagttggacaaggccggcttcatcaagagacaactcgtggaaacccgccagatcaccaagcatgtcgcacagattctcgactcccgcatgaatactaaatacgatgaaaatgacaagctcatcagggaggtcaaggtcatcaccctgaagtccaagctcgtctccgacttccgcaaggacttccagttctacaaggtccgcgagatcaacaactaccaccacgcccacgacgcatacctcaacgctgtggttggaacagcactcatcaagaagtaccccaagctcgagtccgagttcgtctacggcgactacaaggtctacgacgtcaggaagatgatcgccaagtccgagcaagagatcggaaaggccaccgcaaaatatttcttctactccaacataatgaacttcttcaaaaccgagatcaccctggctaacggagaaataaggaagaggcccctgatagaaaccaacggcgagacaggcgagattgtctgggacaaaggcagggacttcgcaaccgtcagaaaggtgctcagtatgcctcaggtcaacatagtcaaaaagaccgaagtccagactggaggattctccaaggagtccatcctccccaaaaggaactccgacaaactgatcgccaggaaaaaggactgggaccccaaaaaatatggcggcttcgactcccctactgttgcttacagtgtgctcgtcgtcgcaaaagtcgagaaggggaaatccaagaagctcaagtcagtgaaggagctcctcggcatcaccatcatggagaggtcctccttcgagaagaaccccatcgacttcctcgaggccaagggatataaggaggtcaagaaggacctcatcattaaactccccaagtactccctcttcgagctcgaaaacggacgcaagaggatgctcgcttcagctggtgaactccagaagggcaacgaactcgctttgccctctaaatacgtcaacttcctctacctcgcctcccactatgaaaagctcaagggctccccagaggacaacgagcagaagcaactcttcgtcgagcagcacaagcattacctcgacgagatcatcgagcagatctccgagttctccaagagagtcatcctcgctgacgcaaacctcgacaaggtcctcagtgcatataacaagcaccgcgacaaaccaataagggagcaggccgaaaatattatacacctgttcaccctcaccaacttgggagcaccagccgccttcaagtatttcgacaccaccatcgacagaaagcgctacacctccacaaaggaggtcctggacgccacacttatccaccagtccatcaccggcctctatgaaacacgcatcgacctctctcaattgggaggggacaagagaccaagagacagacacgatggagagcttggaggtagaaagagagcaaggtagttcgaactggccaggtaccgttaacctagacttgtccatcttctggattggccaacttaattaatgtatgaaataaaaggatgcacacatagtgacatgctaatcactataatgtgggcatcaaagttgtgtgttatgtgtaattactagttatctgaataaaagagaaagagatcatccatatttcttatcctaaatgaatgtcacgtgtctttataattctttgatgaaccagatgcatttcattaaccaaatccatatacatataaatattaatcatatataattaatatcaattgggttagcaaaacaaatctagtctaggtgtgttttgcaagcttggcgcgccgttaacttaacggcaaacgctaattagtcactaggcccaggaaacactaactaagccctagcttatcctagcgcaacctagttaggtcttggtaacccgggtaccctgggatccgatatcgatgggccctggccgaagctttgctctagatcaaactcacatccaaacataacatggatatcttccttaccaatcatactaattattttgggttaaatattaatcattatttttaagatattaattaagaaattaaaagattttttaaaaaaatgtataaaattatattattcatgatttttcatacatttgattttgataataaatatattttttttaatttcttaaaaaatgttgcaagacacttattagacatagtcttgttctgtttacaaaagcattcatcatttaatacattaaaaaatatttaatactaacagtagaatcttcttgtgagtggtgtgggagtaggcaacctggcattgaaacgagagaaagagagtcagaaccagaagacaaataaaaagtatgcaacaaacaaatcaaaatcaaagggcaaaggctggggttggctcaattggttgctacattcaattttcaactcagtcaacggttgagattcactctgacttccccaatctaagccgcggatgcaaacggttgaatctaacccacaatccaatctcgttacttaggggcttttccgtcattaactcacccctgccacccggtttccctataaattggaactcaatgctcccctctaaactcgtatcgcttcagagttgagaccaagacacactcgttcatatatctctctgctcttctcttctcttctacctctcaaggtacttttcttctccctctaccaaatcctagattccgtggttcaatttcggatcttgcacttctggtttgctttgccttgctttttcctcaactgggtccatctaggatccatgtgaaactctactctttctttaatatctgcggaatacgcgtttgactttcagatctagtcgaaatcatttcataattgcctttctttcttttagcttatgagaaataaaatcactttttttttatttcaaaataaaccttgggccttgtgctgactgagatggggtttggtgattacagaattttagcgaattttgtaattgtacttgtttgtctgtagttttgttttgttttcttgtttctcatacattccttaggcttcaattttattcgagtataggtcacaataggaattcaaactttgagcaggggaattaatcccttccttcaaatccagtttgtttgtatatatgtttaaaaaatgaaacttttgctttaaattctattataactttttttatggctgaaatttttgcatgtgtctttgctctctgttgtaaatttactgtttaggtactaactctaggcttgttgtgcagtttttgaagtataaccatgccacacaacacaatggcggccaccgcttccagaaccacccgattctcttcttcctcttcacaccccaccttccccaaacgcattactagatccaccctccctctctctcatcaaaccctcaccaaacccaaccacgctctcaaaatcaaatgttccatctccaaaccccccacggcggcgcccttcaccaaggaagcgccgaccacggagcccttcgtgtcacggttcgcctccggcgaacctcgcaagggcgcggacatccttgtggaggcgctggagaggcagggcgtgacgacggtgttcgcgtaccccggcggtgcgtcgatggagatccaccaggcgctcacgcgctccgccgccatccgcaacgtgctcccgcgccacgagcagggcggcgtcttcgccgccgaaggctacgcgcgttcctccggcctccccggcgtctgcattgccacctccggccccggcgccaccaacctcgtgagcggcctcgccgacgctttaatggacagcgtcccagtcgtcgccatcaccggccaggtcgcccgccggatgatcggcaccgacgccttccaagaaaccccgatcgtggaggtgagcagatccatcacgaagcacaactacctcatcctcgacgtcgacgacatcccccgcgtcgtcgccgaggctttcttcgtcgccacctccggccgccccggtccggtcctcatcgacattcccaaagacgttcagcagcaactcgccgtgcctaattgggacgagcccgttaacctccccggttacctcgccaggctgcccaggccccccgccgaggcccaattggaacacattgtcagactcatcatggaggcccaaaagcccgttctctacgtcggcggtggcagtttgaattccagtgctgaattgaggcgctttgttgaactcactggtattcccgttgctagcactttaatgggtcttggaacttttcctattggtgatgaatattcccttcagatgctgggtatgcatggtactgtttatgctaactatgctgttgacaatagtgatttgttgcttgcctttggggtaaggtttgatgaccgtgttactgggaagcttgaggcttttgctagtagggctaagattgttcacattgatattgattctgccgagattgggaagaacaagcaggcgcacgtgtcggtttgcgcggatttgaagttggccttgaagggaattaatatgattttggaggagaaaggagtggagggtaagtttgatcttggaggttggagagaagagattaatgtgcagaaacacaagtttccattgggttacaagacattccaggacgcgatttctccgcagcatgctatcgaggttcttgatgagttgactaatggagatgctattgttagtactggggttgggcagcatcaaatgtgggctgcgcagttttacaagtacaagagaccgaggcagtggttgacctcagggggtcttggagccatgggttttggattgcctgcggctattggtgctgctgttgctaaccctggggctgttgtggttgacattgatggggatggtagtttcatcatgaatgttcaggagttggccactataagagtggagaatctcccagttaagatattgttgttgaacaatcagcatttgggtatggtggttcagttggaggataggttctacaagtccaatagagctcacacctatcttggagatccgtctagcgagagcgagatattcccaaacatgctcaagtttgctgatgcttgtgggataccggcagcgcgagtgacgaagaaggaagagcttagagcggcaattcagagaatgttggacacccctggcccctaccttcttgatgtcattgtgccccatcaggagcatgtgttgccgatgattcccagtaatggatccttcaaggatgtgataactgagggtgatggtagaacgaggtactgattgcctagaccaaatgttccttgatgcttgttttgtacaatatatataagataatgctgtcctagttgcaggatttggcctgtggtgagcatcatagtctgtagtagttttggtagcaagacattttattttccttttatttaacttactacatgcagtagcatctatctatctctgtagtctgatatctcctgttgtctgtattgtgccgttggattttttgctgtagtgagactgaaaatgatgtgctagtaataatatttctgttagaaatctaagtagagaatctgttgaagaagtcaaaagctaatggaatcaggttacatattcaatgtttttctttttttagcggttggtagacgtgtagattcaacttctcttggagctcacctaggcaatcagtaaaatgcatattccttttttaacttgccatttatttacttttagtggaaattgtgaccaatttgttcatgtagaacggatttggaccattgcgtccacaaaacgtctcttttgctcgatcttcacaaagcgataccgaaatccagagatagttttcaaaagtcagaaatggcaaagttataaatagtaaaacagaatagatgctgtaatcgacttcaataacaagtggcatcacgtttctagttctagacccatcagctgaggtacaaattaattaataagtgactagggtcacgtgaccctagtcacttatgattccgatgacttcgtaggttcctagctcaagccgctcgtgtccaagcgtcacttacgattagctaatgattacggcatctaggaccgactagttcttatgtgcttctagtctccaaatgtggttgatagttattttgctctaagatcaacagtaatgaagtataaatcatcgttgtggtgtgctactcggttaattgagcattaacacacacaaacatgacgaggatggtataatctccaaaaatgtgtactttgttaggtgggaccctatagccttgattaatgtgctatgttaggcatgcctggaaacgtgtgacgcatatgttttgtgaacctgttgatattatatgtgcttttatattaccatattttattaaaatactaatatttattactagtaagatataacattctatctagcttaaaaactaaccataaatattccataataactagatttaccaaactaatatactaaatatacataataaatacaaaattaacaagacaataatcaatatttatgagcttaatatatttagacattatggttggtcgacgataatcatgctaacttttcgtaattgcttgattgaaatatgcttagaataatgcctctttgttctacatggcaaatagggaccattatggtgtaacaccctgggaaccacaaacaccccgaaatgctactaaactacacaactaaccttcatatataaaatttcgacagcatctcctttgaaaatttgcatagacgtggaagcaacagagtataaacagatctagctagctaagtttctagctagctaagtttaaacggccggccaaacgtgcaagcgctactagacaattcagtacattaaaaacgtccgcaatgtgttattaagttgtctaagcgtcaatttatttacaattgaatatatcctgccaccagccagccaacagctccccgaccggcagctcggcacaaaatcaccactcgatacaggcagcccatcagtccgggacggcgtcagcgggagagccgttgtaaggcggcagactttgctcatgttaccgatgctattcggaagaacggcaactaagctgccgggtttgaaacacggatgatctcgcggagggtagcatgttgattgtaacgatgacagagcgttgctgcctgtgatcaaatatcatctccctcgcagagatccgaattatcagccttcttattcatttctcgcttaaccgtgacaggcgcgcgcggtgccacctgggtccttttcatcacgtgctataaaaataattataatttaaattttttaatataaatatataaattaaaaatagaaagtaaaaaaagaaattaaagaaaaaatagtttttgttttccgaagatgtaaaagactctagggggatcgccaacaaatactaccttttatcttgctcttcctgctctcaggtattaatgccgaattgtttcatcttgtctgtgtagaagaccacacacgaaaatcctgtgattttacattttacttatcgttaatcgaatgtatatctatttaatctgcttttcttgtctaataaatatatatgtaaagtacgctttttgttgaaattttttaaacctttgtttatttttttttcttcattccgtaactcttctaccttctttatttactttctaaaatccaaatacaaaacataaaaataaataaacacagagtaaattcccaaattattccatcattaaaagatacgaggcgcgtgtaagttacaggcaagcgatccgtcctaagaaaccattattatcatgacattaacctataaaaataggcgtatcacgaggccctttcgtctcgcgcgtttcggtgatgacggtgaaaacctctgacacatgcagctcccggagacggtcacagcttgtctgtaagcggatgccgggagcagacaagcccgtcagggcgcgtcagcgggtgttggcgggtgtcggggctggcttaactatgcggcatcagagcagattgtactgagagtgcaccataccacagcttttcaattcaattcatcattttttttttattcttttttttgatttcggtttctttgaaatttttttgattcggtaatctccgaacagaaggaagaacgaaggaaggagcacagacttagattggtatatatacgcatatgtagtgttgaagaaacatgaaattgcccagtattcttaacccaactgcacagaacaaaaacctgcaggaaacgaagataaatcatgtcgaaagctacatataaggaacgtgctgctactcatcctagtcctgttgctgccaagctatttaatatcatgcacgaaaagcaaacaaacttgtgtgcttcattggatgttcgtaccaccaaggaattactggagttagttgaagcattaggtcccaaaatttgtttactaaaaacacatgtggatatcttgactgatttttccatggagggcacagttaagccgctaaaggcattatccgccaagtacaattttttactcttcgaagacagaaaatttgctgacattggtaatacagtcaaattgcagtactctgcgggtgtatacagaatagcagaatgggcagacattacgaatgcacacggtgtggtgggcccaggtattgttagcggtttgaagcaggcggcagaagaagtaacaaaggaacctagaggccttttgatgttagcagaattgtcatgcaagggctccctatctactggagaatatactaagggtactgttgacattgcgaagagcgacaaagattttgttatcggctttattgctcaaagagacatgggtggaagagatgaaggttacgattggttgattatgacacccggtgtgggtttagatgacaagggagacgcattgggtcaacagtatagaaccgtggatgatgtggtctctacaggatctgacattattattgttggaagaggactatttgcaaagggaagggatgctaaggtagagggtgaacgttacagaaaagcaggctgggaagcatatttgagaagatgcggccagcaaaactaaaaaactgtattataagtaaacgcgcgcgggcgcgccttttcagcctgatacagattaaatcagaacgcagaagcggtctgataaaacagaatttgcctggcggcagtagcgcggtggtcccacctgaccccatgccgaactcagaagtgaaacgccgtagcgccgatggtagtgtggggtctccccatgcgagagtagggaactgccaggcatcaaataaaacgaaaggctcagtcgaaagactgggcctttcgttttatctgttgtttgtcggtgaacgctctcctgagtaggacaaatccgccgggagcggatttgaacgttgcgaagcaacggcccggagggtggcgggcaggacgcccgccataaactgccaggcatcaaattaagcagaaggccatcctgacggatggcctttttgcgtttctacaaactcttaccgcacccggagcgggcgcgaggccgccaaggcccgaggcgtgaagtttggcccccgccctaccctcaccccggcacagatcgcgcacgcccgcgagctgatcgaccaggaaggccgcaccgtgaaagaggcggctgcactgcttggcgtgcatcgctcgaccctgtaccgcgcacttgagcgcagcgaggaagtgacgcccaccgaggccaggcggcgcggtgccttccgtgaggacgcattgaccgaggccgacgccctggcggccgccgagaatgaacgccaagaggaacaagcatgaaaccgcaccaggacggccaggacgaaccgtttttcattaccgaagagatcgaggcggagatgatcgcggccgggtacgtgttcgagccgcccgcgcacgtctcaaccgtgcggctgcatgaaatcctggccggtttgtctgatgccaagctggcggcctggccggccagcttggccgctgaagaaaccgagcgccgccgtctaaaaaggtgatgtgtatttgagtaaaacagcttgcgtcatgcggtcgctgcgtatatgatgcgatgagtaaataaacaaatacgcaaggggaacgcatgaaggttatcgctgtacttaaccagaaaggcgggtcaggcaagacgaccatcgcaacccatctagcccgcgccctgcaactcgccggggccgatgttctgttagtcgattccgatccccagggcagtgcccgcgattgggcggccgtgcgggaagatcaaccgctaaccgttgtcggcatcgaccgcccgacgattgaccgcgacgtgaaggccatcggccggcgcgacttcgtagtgatcgacggagcgccccaggcggcggacttggctgtgtccgcgatcaaggcagccgacttcgtgctgattccggtgcagccaagcccttacgacatatgggccaccgccgacctggtggagctggttaagcagcgcattgaggtcacggatggaaggctacaagcggcctttgtcgtgtcgcgggcgatcaaaggcacgcgcatcggcggtgaggttgccgaggcgctggccgggtacgagctgcccattcttgagtcccgtatcacgcagcgcgtgagctacccaggcactgccgccgccggcacaaccgttcttgaatcagaacccgagggcgacgctgcccgcgaggtccaggcgctggccgctgaaattaaatcaaaactcatttgagttaatgaggtaaagagaaaatgagcaaaagcacaaacacgctaagtgccggccgtccgagcgcacgcagcagcaaggctgcaacgttggccagcctcgcagacacgccagccatgaagcgggtcaactttcagttgccggcggaggatcacaccaagctgaagatgtacgcggtacgccaaggcaagaccattaccgagctgctatctgaatacatcgcgcagctaccagagtaaatgagcaaatgaataaatgagtagatgaattttagcggctaaaggaggcggcatggaaaatcaagaacaaccaggcaccgacgccgtggaatgccccatgtgtggaggaacgggcggttggccaggcgtaagcggctgggttgcctgccggccctgcaatggcactggaacccccaagcccgaggaatcggcgtgagcggtcgcaaaccatccggcccggtacaaatcggcgcggcgctgggtgatgacctggtggagaagttgaaggcagcgcaggccgcccagcggcaacgcatcgaggcagaagcacgccccggtgaatcgtggcaagcagccgctgatcgaatccgcaaagaatcccggcaaccgccggcagccggtgcgccgtcgattaggaagccgcccaagggcgacgagcaaccagattttttcgttccgatgctctatgacgtgggcacccgcgatagtcgcagcatcatggacgtggccgttttccgtctgtcgaagcgtgaccgacgagctggcgaggtgatccgctacgagcttccagacgggcacgtagaggtttccgcagggccggcaggcatggccagtgtgtgggattacgacctggtactgatggcggtttcccatctaaccgaatccatgaaccgataccgggaagggaagggagacaagcccggccgcgtgttccgtccacacgttgcggacgtactcaagttctgccggcgagccgatggcggaaagcagaaagacgacctggtagaaacctgcattcggttaaacaccacgcacgttgccatgcagcgtacgaagaaggccaagaacggccgcctggtgacggtatccgagggtgaagccttgattagccgctacaagatcgtaaagagcgaaaccgggcggccggagtacatcgagatcgagctagctgattggatgtaccgcgagatcacagaaggcaagaacccggacgtgctgacggttcaccccgattactttttgatcgatcccggcatcggccgttttctctaccgcctggcacgccgcgccgcaggcaaggcagaagccagatggttgttcaagacgatctacgaacgcagtggcagcgccggagagttcaagaagttctgtttcaccgtgcgcaagctgatcgggtcaaatgacctgccggagtacgatttgaaggaggaggcggggcaggctggcccgatcctagtcatgcgctaccgcaacctgatcgagggcgaagcatccgccggttcctaatgtacggagcagatgctagggcaaattgccctagcaggggaaaaaggtcgaaaaggtctctttcctgtggatagcacgtacattgggaacccaaagccgtacattgggaaccggaacccgtacattgggaacccaaagccgtacattgggaaccggtcacacatgtaagtgactgatataaaagagaaaaaaggcgatttttccgcctaaaactctttaaaacttattaaaactcttaaaacccgcctggcctgtgcataactgtctggccagcgcacagccgaagagctgcaaaaagcgcctacccttcggtcgctgcgctccctacgccccgccgcttcgcgtcggcctatggcgcgccggaaaatatgcatggcatgcccgttccatacagaagctgggcgaacaaacgatgctcgccttccagaaaaccgaggatgcgaaccacttcatccggggtcagcaccaccggcaagcgccgcgacggccgaggtcttccgatctcctgaagccagggcagatccgtgcacagcaccttgccgtagaagaacagcaaggccgccaatgcctgacgatgcgtggagaccgaaaccttgcgctcgttcgccagccaggacagaaatgcctcgacttcgctgctgcccaaggttgccgggtgacgcacaccgtggaaacggatgaaggcacgaacccagtggacataagcctgttcggttcgtaagctgtaatgcaagtagcgtatgcgctcacgcaactggtccagaaccttgaccgaacgcagcggtggtaacggcgcagtggcggttttcatggcttgttatgactgtttttttggggtacagtctatgcctcgggcatccaagcagcaagcgcgttacgccgtgggtcgatgtttgatgttatggagcagcaacgatgttacgcagcagggcagtcgccctaaaacaaagttaaacatcatgagggaagcggtgatcgccgaagtatcgactcaactatcagaggtagttggcgtcatcgagcgccatctcgaaccgacgttgctggccgtacatttgtacggctccgcagtggatggcggcctgaagccacacagtgatattgatttgctggttacggtgacggtaaggcttgatgaaacaacgcggcgagctttgatcaacgaccttttggaaacttcggcttcccctggagagagcgagattctccgcgctgtagaagtcaccattgttgtgcacgacgacatcattccgtggcgttatccagctaagcgcgaactgcaatttggagaatggcagcgcaatgacattcttgcaggtatcttcgagccagccacgatcgacattgatctggctatcttgctgacaaaagcaagagaacatagcgttgccttggtaggtccagcggcggaggaactctttgatccggttcctgaacaggatctatttgaggcgctaaatgaaaccttaacgctatggaactcgccgcccgactgggctggcgatgagcgaaatgtagtgcttacgttgtcccgcatttggtacagcgcagtaaccggcaaaatcgcgccgaaggatgtcgctgccgactgggcaatggagcgcctgccggcccagtatcagcccgtcatacttgaagctagacaggcttatcttggacaagaagaagatcgcttggcctcgcgcgcagatcagttggaagaatttgtccactacgtgaaaggcgagatcaccaaggtagtcggcaaataatgtctaacaattcgttcaagccgacgccgcttcgcggcgcggcttaactcaagcgttagatgcactatacgtaaccaactagtaggaacagtgaattggagttcgtcttgttataattagcttcttgggggatctttaaatactgtagaaaagaggaaggaaataataaatggctaaaatgagaatatcaccggaattgaaaaaactgatcgaaaaataccgctgcgtaaaagatacggaaggaatgtctcctgctaaggtatataagctggtgggagaaaatgaaaacctatatttaaaaatgacggacagccggtataaagggaccacctatgatgtggaacgggaaaaggacatgatgctatggctggaaggaaagctgcctgttccaaaggtcctgcactttgaacggcatgatggctggagcaatctgctcatgagtgaggccgatggcgtcctttgctcggaagagtatgaagatgaacaaagccctgaaaagattatcgagctgtatgcggagtgcatcaggctctttcactccatcgacatatcggattgtccctatacgaatagcttagacagccgcttagccgaattggattacttactgaataacgatctggccgatgtggattgcgaaaactgggaagaagacactccatttaaagatccgcgcgagctgtatgattttttaaagacggaaaagcccgaagaggaacttgtcttttcccacggcgacctgggagacagcaacatctttgtgaaagatggcaaagtaagtggctttattgatcttgggagaagcggcagggcggacaagtggtatgacattgccttctgcgtccggtcgatcagggaggatatcggggaagaacagtatgtcgagctattttttgacttactggggatcaagcctgattgggagaaaataaaatattatattttactggatgaattgttttagtacctagatacttcgctcgtgaaaagcagcgctcagggggctagtgcgctcttccgcttcctcgctcactgactcgctgcgctcggtcgttcggctgcggcgagcggtatcagctcactcaaaggcggtaatacggttatccacagaatcaggggataacgcaggaaagaacatgtgagcaaaaggccagcaaaaggccaggaaccgtaaaaaggccgcgttgctggcgtttttccataggctccgcccccctgacgagcatcacaaaaatcgacgctcaagtcagaggtggcgaaacccgacaggactataaagataccaggcgtttccccctggaagctccctcgtgcgctctcctgttccgaccctgccgcttaccggatacctgtccgcctttctcccttcgggaagcgtggcgctttctcatagctcacgctgtaggtatctcagttcggtgtaggtcgttcgctccaagctgggctgtgtgcacgaaccccccgttcagcccgaccgctgcgccttatccggtaactatcgtcttgagtccaacccggtaagacacgacttatcgccactggcagcagccactggtaacaggattagcagagcgaggtatgtaggcggtgctacagagttcttgaagtggtggcctaactacggctacactagaagaacagtatttggtatctgcgctctgctgaagccagttaccttcggaaaaagagttggtagctcttgatccggcaaacaaaccaccgctggtagcggtggtttttttgtttgcaagcagcagattacgcgcagaaaaaaaggatctcaagaagatcctttgatcttttctacggggtctgacgctcagtggaacgaaaactcacgttaagggattttggtcatgagattatcaaaaaggatcttcacctagatccttttaaattaaaaatgaagcgtacgttggaatcgcttctacaaaa

SEQ ID NO: 106 - DNA, 25 bp, Artificial Sequence
  Artificial DNA sequence depicted in FIG. 19B for the WT soy sequence (SEQ ID NO:106)
tggtactgcaatgcgtcctttgaca

SEQ ID NO: 107 - DNA, 25 bp, Artificial Sequence
  Artificial DNA sequence depicted in FIG. 19B for the donor DNA for gRNA2 (SEQ ID NO:107)
tggtattgcaatgagatctttgaca

SEQ ID NO: 108 - DNA, 38813 bp, Artificial Sequence
  Nucleotide sequence of PHP70365; pVIR8
ttatacaaagttgatagattgtatgaattcatttacaattgaatatatcctgccattttacacctcgatatatcctgccacaaattccatgtacacagtacattaaaaacgtccgcaatgtgttattaagttgtctaagcgtcaatttgtttacaccacaatatatcctgccaccagccagccaacagctccccgaccggcagctcggcacaaaatcaccactcgatacaggcagcccatcagtccactagagggcccgccgagaatgaacgccaagaggaacaagcatgaaaccgcaccaggacggccaggacgaaccgtttttcattaccgaagagatcgaggcggagatgatcgcggccgggtacgtgttcgagccgcccgcgcacgtctcaaccgtgcggctgcatgaaatcctaggaaatatcagccgcttgtgtgttcaattcttctctgtttcacttgaaacaaattgaatagatattcccgctttcaaagccatttacaaatcctctcgtgcagcctaacgccattggcgtggaacaagcgttggcacgaggaagtaagtgcgatgaacggaaggtattcaccgacgcggcaggattttaagacaggcgcgaagccttggtctatattagcccttatcgttgccgcaatgattttcgcgttcatggcggttgcgtcctggcaggacaatgggactacccaggcaatccttagccaaatacgatcgattaacgctgacagcgcctcactgcagcgcgatgtactccgcgctcacacgggcaccgtggcgaactaccgccccattatctccaggctgggagctctgcggaagaatctggaagatttgaagcaattatttaggcaatctcatattgtaagtgagagcaatgctgctcaactgctacgccggctagaagtgtctctaaattcggctgacgcggcggtcgccgcctttggtgcgcaaaatgtccgcctgcaagattcgctggccagtttcactcgtgctttaagcaatcttccaggaaaggcctcaggcgatcagactttagaaaaaccaacagaattggctagcatgatgctccaatttcttcggcaaccaagcccggctatttcattcgagatcagccttgaactagagaggctccaaaaacaacgcggtcttgatgaagctcccgtgcgcatactttcgcgtgaaggtcccattatcttatcgcttttgccacaggtgaacgatctggtgaacatgattcagacgtctgacaccgcagaaattgcggaaatgttgcagcgtgagtgtttggaggtctatagcttgaaaaatgtggaggagcggagcgcacgtatctttcttgggtccgcttcagtgggtctttgcctgtacatcatcaccttagtctataggctacgcaaaaaaaccgattggttagcgcggcgtttagattacgaagagctaatcaaagagatcggagtatgttttgaaggtgaggcggccactacgtcgtccgcgcaagctgcacttggtattattcagcgcttctttgatgccgatacgtgcgcgttagctctagtggaccatgaccgtaggtgggctgtcgaaacattcggtgcgaagcacccaaaacccgtgtgggacgacagggtgctacgcgaaatagtctctcgtaccaaagcgaacgaacgggcgacggtattccgcatcgtatcgacgcaaaaaatcgtacatttgcctcccgaaattccaggtctttcgatactactggctcacaaatccacagataaactaattgcggtttgttcactgggttaccaaagctatcgccctcgaccttgccaaggcgaaattcagcttcttgaactcgccaccgcctgcctctgtcactatatcgatgttcggcgtaagcagaccgaatgcgacgttttggccagacgattggagcatgcgcaacgccttgaggcagttggtacacttgccggcggaatagcacatgaatttaataacattttggggtcaatcctcgggcacgcagaattggcccaaaactcggtgtctcgaacatctgtcacccgaagatacattgactatatcatttcgtcaggcgacagagccatgctcattatcgatcagatcttgacgctgagccgaaaacaagagcgcgtgatcaagccatttagtgtctcagagcttgtgaccgaaatcgctcccttgctacgtatggctcttcccccaaccatcgagcttagtttcagatttgatcaaatgcagagcgtgatcgaaggaagcccgcttgaacttcaacaggtactaattaacctctgcaagaatgcttcccaagccatgactgcaaatggtcaaatcgacatcttcgtcggccaagcttatttaccagctaagaaaattctggcgcatggtgttatgccacctggcgactatgttctactatctgtcagcgacaatggtggaggcatttcagaggctgtgctaccctacatttttgaacccttctttacgacacgtgctcgcaacggtggaacgggtctcggcctcgcttctgtgcatggtcatatcagcgcgtttgcaggttacatcgacgttagttcaactgttgggcatgggacgcgctttgacatttatctccctccgtcttctaaggagcccgtcaatcccgacagctttttcggccgcaataaggcaccgcgtggaaacggggagattgtggcacttgttgagcccgatgacctcctgcgggaggcgtatgaagacaagatcgccgctctgggatatgagccggtcggttttcgtacctttagtgaaattcgcgattggatttcaaaaggcaatgaagccgatctggtcatggtcgaccaagcgtctcttcctgaagatcaaagtcctaattccgtggatttagtgctcaagaccgcctccatcatcattggcggaaatgatctcaaaatgcccctttcaagggagaatgcgaccagggacctttatctgccgaagccgatatcgtccagaactatggcgcatgcaatcctaaccaaaatcaagacgtagagttgcgacgtatcaggactgggcaatcgcggccgccgggcttacgtgtcttttgtaacaaattgcgacgcagttgatatccacttgaaacattagtccgaaattatcgagatctccgctgataaggtatcgaaatggcgataaaattggtattgatactcgtattcacactctttcccgcggcagacgctgcatatgcgaatgaccgcgccaacggtttcatgtggtcaaacgggggcgaaactggagtgaggcttcctcttcgggtgttcaatgccaagccagccaagaacacggtggcgatcatttattccggagacgctggatggcaaaatatcgatgaggcgattggtacctatctgcagacggaagggattcctgtcattggcgtcagttcacttcggtatttctggtcggagcggtccccaagcgaaactgctaaggatcttggtcacataatcgatgtctacaccaagcatttcggtgtgcagaatgttttacttgtaggatattctttcggcgcggacgtcatgccggcaagcttcaataggcttacgcttgagcaaaaaaatcgggttaagcaaatctctctcttggcattgtcacatcaagtcgactatgtcgtctcatttaggggctggctccaactcgaaacggaaggtaagggcggcaatcctctggatgatctcagatccattgaccctgcaatcgtccaatgcatgtacgggcgcgaagaccgtaataatgcttgcccatctctccgacagaccggcgcagaggtgataggcttcagcggaggccatcactttgataatgatttcaaaaaactgtctacgcgcgtcgtctcaggcctcgtggcacgcctaagtcatcagtaatctttagttcctgcaccgcgggacccgcgaggtttctcgcttcaattgaaatcataaagaagcaattgaaaattttcgagtaaccgaccctcccgataatcttcaacataaaacaacgcacttcttccaacgggagaggcggtgttagttgcgagctaaggagataaggtatgcttaagagatcggggtcgctttctcttgccttgatggtctccttctgttcgtcgagccttgccacgccactctcatctgctgagtttgaccatgttgctcgcaagtgtgccccatcagttgcgacatctacgcttgcggcgatagctaaggtggagagtcgctttgatcctttagcgattcatgacaacacgaccggcgaaacgcttcactggcaagatcacagccaagcaacccaagtcgtcaggcaccgtctcgatgcacggcattcgctggatgttggcctcatgcaaataaactctcgaaatttttctatgctcggtctgacacctgacggtgcgctccaggcgtgcacatcattatctgccgctgcaaacatgctgaaaagtcgttatgcaggcggcgaaacgattgacgagaagcaatttgcgcttcgtcgggcgatctccgcttacaacaccggtaatttcatcggcggttttgcaaacggctacgtgcgaaaagttgaaacagctgctcaatcgctggtgcccgcgttaatcgagcctccaaaagacgatcacgaggcgctaaaatccgaagagacgtgggatgtttgggggtcatatcagcgccgctcgcaggaggatggcgctggcggtttaatcgctccgccaccgccacaccaggacaacggcaaatccgcagacgacaatcaagtcttattcgacttatactaaggaggtgcgcattgatgcgatgctttgagagataccgtttacatctaaatcgcctctcgctctcgaatgcgatgatgcgcgtgatatcgagctgcgccccaagcttgtgcggtgcaattgcatggagcatttcctcatccggacccgccgcagcgcaatctgcgggtggcggcactgaccccgccacaatggttaacaatatatgcacgtttatccttggtccgttcggccagtcactcgctgttctcggcattgtcgctatcgggatctcctggatgttcgggcgggcttcgcttgggctggttgccggcgtcgtcggcggcattgttatcatgtttggggcgagcttcctcggccaaacgctcactggcggtagttgatggctgatcgtttggaagaatcgaccctttacctcgcagccacacggcccgcattgtttcttggggtgccactgacattggcagggttattcatgatgttcgccggctttgtcatcgttatcgttcagaacccgctctacgaagtcgttctcgtgccgttatggtttgcagcccggctcatcgtggagcgagactacaatgcggcgagcgtcgtcctgctatttttgcggaccgcgggaagaagcattgatagtgcagtttgggggggcgctactgttagcccaaatccaattagggttcccccacgagggagaggaatggtgtgatgctcggcgcgagtggaacgaccgaaagatccggtgagatctatctcccttatattggccacctcagcgaccatatcgtccttcttgaagacggatcgatcatgaccattgcgagaattgatggcgttgcattcgagcttgaggaaactgaaatgcgcaatgcgcgttgtcgtgcgttcaacacgctgttgcgcaatatcgctgatgatcatgtgtcaatatatgctcacctcgtacgtcatgccgacgtgccatcatcggcgccgcgacacttccgtagtgttttcgccgctagcctgaacgaagcttttgaacagcgcgtgctctccggccaactcctccgcaatgaacacttccttacgttgattgtctacccacaggcggctttagggaaggtaaagaggaggttcaccaagctaagcggaaaaagggaaaacgatctcacgggccagatcaggaacatggaagatctttggcatgttgtcgctggctctcttaaagcgtatggcctgcatcgtcttggcatccgcgagaagcagggtgtgctcttcaccgaaattggcgaagcgctacggttgatcatgactggtcggttcacaccggttccggtcgtcagcggctcactcggcgcttcgatttataccgacagagtcatttgcggcaagcgaggactcgagatcagaacgccaaaagacagttacgttggatccatctattcgtttcgcgaataccctgcaaaaacacggccgggcatgctcaacgcgctgctatccctcgattttccacttgttctcacgcagagtttttcgttcctgactcgcccgcaagcgcacgcgaaacttagcctcaaatcgagccagatgctgagttccggcgataaagccgtgactcaaatcggcaaattatccgaggctgaggacgcacttgcgagcaacgaattcgttatgggctcacatcatttgagcctttgcgtctatgcagacgatctcaatagtcttggggacaggggcgcgcgggctcggacacgaatggcggatgcaggtgccgtggttgtccaagaaggtattggtatggaagcggcctattggtcccaattgccggggaattttaagtggcgcacacgccctggcgcaatcacttcacgcaatttcgcagggtttgtctctttcgaaaactttccagagggcgccagctcaggccactggggcaacgcgattgcccgatttcgtaccaatggcggaacgcctttcgactatatcccgcatgagcacgatgttggcatgacggcaatattcgggcctatcgggaggggtaagacgacgctcatgatgtttgttctagccatgctcgaacagagcatggtcgaccgtgcaggtacggtcgtgttctttgacaaggaccggggtggcgaattgctggttcgcgccacaggaggaacatatttggcacttcacagaggcacacccagcgggttggcgccgttgcgtggcctagaaaacacagcagcctcacacgattttctgcgcgaatggatcgtggctctcatcgagagtgatggtcggggtgggatttctccggaagagaaccgccgtctggtccgtggtatccatcgtcagctctcgtttgatccacaaatgcgttcaatcgcggggttacgtgaatttttgttgcatgggcccgccgaaggcgcaggagcgcggctccaacgctggtgccggggccatgcgcttggctgggcatttgacggcgaagttgacgaagtaaagttagatccgtcgattaccggcttcgacatgacgcatcttctcgaatacgaggaagtatgcgctcccgctgcagcatatctcctgcatcggattggagccatgatcgacggccgccgttttgtgatgagctgcgatgagtttcgcgcctatttgttaaaccctaaattttcgactgtcgtcgacaaattcctcctgaccgttcgaaaaaacaacgggatgctaatactggcaacgcagcaaccagagcatgttctggaatcgccgctaggagccagcttggttgcgcaatgtatgacgaagattttctatccatcaccaaccgcagatcgatcggcttatgtcgatggactgaaatgtaccgaaaaggaatttcaggcgatccgtgaagacatgacggtcggcagccgtaagtttcttcttaaacgagaaagtggaagcgtcatctgcgaatttgatctgcgggatatgcgtgaatatgtcgccgtgctttcggggcgtgccaacacggtgcgctttgcaactcgactacgcgaggcacaagaaggcaactcatctggctggctcagcgaattcatggcccgtcaccacgaggcagaagattgataaggtaggaaacgatgaagacgacgcaacttattgcaacagttttgacctgcagctttctatatattcagcccgcgcgggcgcagtttgttgttagcgacccggcaacggaggctgagacgctcgcgactgcgctcgcgactgcggagaatctcactcagactatagcgatggttacgatgttgacgtcggcctacggcgttactggactactgacttcgctcaaccagaaaaatcagtatccttcgacgaaggacctagacaatgaaatgttttcgccgcgaatgccaatgtcgaccacggcacgtgcgatcaccagcgatacagatcgtgcagtcgtgggtagtgatgctgaagcggacctgttgcgatcgcagatcaccggttccgcaaacagcgctggcattgcggctgacaatctggaaacgatggacaaacgcttgacggcgaatgctgatacgtctgctcagctttcccgatctcgcaatatcatgcaggcaaccgtgaccaatggtttgcttctcaagcagatccatgacgcaatgattcaaaatgtacaggcgacaagcctattaacgatgactaccgcgcaggccggccttcacgaggcggaagaggcggccgctcaacgcaaggagcatcaaaagaccgctgtcatctttggtgccctcccctaaggctgggcgatttgttcatccgcccgcatcctcgccgaatgcgagctcattttatccaacattatgcgacaaaccagtcaagttcaggtccaatcgatgaatttcacgattccggcgccgtttacggccattcatacgatcttcgatgtagccttcacgacaggcttggactcgatgcttgagactatccaggaggcggtgagtgcgccattgatcgcctgtgtcactctttggattattgttcagggtattttagtcatacgcggcgaagtcgatacccgtagcggtatcactcgggtgatcacggtcaccatcgttgttgctctaattgttgggcaggctaactaccaagactatgtggtttccatcttcgaaaagacggtcccaaactttgttcagcagtttagtgtaaccggcttgcctctgcagactgttccggcacagttggatacaatgttcgccgtgacccaggccgtttttcagaaaatcgcatccgaaatcggtccgatgaacgaccaggacatccttgctttccaaggggcacagtgggtcctttacggcacgctctggtctgccttcggagtttacgacgccgttggaattctcacgaaagtgcttctcgcgatcgggcctctgatcctcgtcggatatatttttgatcgcacgcgggacatcgcagctaagtggatcgggcaacttatcacctacggtctcttgcttctcctcttaaacctcgtggcaacgatcgtcatcctaaccgaagcgactgcgctcacccttatgcttggtgtaatcaccttcgccggtacgaccgcggccaagatcattggtctttacgaactcgatatgttttttctgacaggggatgcgctcattgtcgctttgccggcgatcgccggcaacattggaggcagttactggagcggcgcaacccaatctgccagcagcttgtaccgtcgcttcgctcaggttgagcgaggctaggtcgcgcaaaaattcgcctcaatggagaattctatgaagtattgcctgctgtgcctagttgtcgctttgagcggctgccagacaaacgacacattagcgagctgcaaaggcccgatcttcccgctgaatgtggggcgatggcagcctactccgtcagatcttcagctcggcaattcgggtggacgctatgacggggcctgaatatgccatgctagtggcgcgcgaaagccttgccgagcactataaggaagtagaagcctttcaaaccgcgcgagcgaaatcggcgcgacgtctctccaaactcattgcagctgtcgcagctatcgcgattttgggaaatgttgctcaagcgttcgctatagccacaatggtgccgttgagcaggcttgtgcccgtatatctatggatacggccggacggcaccgttgacagcgaggtgtctgtctcgcgattgcctgcaactcaagaggaggccgtcgttaacgcctcattgtgggagtacgttcgcctgcgcgagagttatgatgccgacaccgctcagtacgcctacgacctggtatcgaacttcagtgccccaacagtgcgccaggattaccagcaattcttcaactatcccaatcccagttcgcctcaagtcattcttggcaaacgcggcagggtggaggtcgagcacatcgcttcaaatgatgtaactccaagcacgcagcaaattcgctataaaaggaccctcgtcgttgacggcaaaatgcctgtggtgagtacgtggaccgcgacagttcgctacgaaaaggtgaccagcttgcccggcagattgagactaaccaacccggcaggtctggttgtcacctcctatcagacatcggaagataccgtttcaaacgtaggccacagcgaaccatgatcagaaaagcacttttcattttagcatgtttatttgccgctgcgactggtgcggaggctgaagacactccaatggcgggcaagctagatccgcgcatgcgttatttggcttacaatcccgatcaagtggtgcgcctctcgacggcggttggagctactttggtcgtaacattcgccacgaacgaaacggtgacagcggttgccgtttcaaatagcaaagatctagcagccctaccgcggggaaattatctatttttcaaggcaagccaggtcctcacgcctcagccagtaatcgtgctaaccgcaagcgactccgggatgcgccgttatgttttcagtataagttccaagactctgtcccacctcgataaagagcagcccgatctctattacagcgtccaattcgcctaccccgccgacgatgcggcggctcggcgaagggaggcacaacagaaggctgttgtggacagactacacgcggaagcacaatatcaacggaaagctgagaatttattggatcagcctgtcacagcccttggtgcggcggacagtaattggcactacgtcgcccaaggcgatcgttcgctgttgccactcgaagtcttcgacaatggatttacgacggtattccactttccgggcaatgtacgcataccctccatctacaccatcaatcctgatggcaaggaagctgttgccaactattcagttaaagggagcgatgtcgagatttcttcggtttcccgaggttggcgtctgagggatggccacacagtactatgtatctggaacaccgcttacgatcccgttggccaaaggccgcaaacgggcacggtgaggcccgatgtgaaacgcgtcctgaagggggcgaagggatgaataacgatagtcagcaagcggcacatgaggttgatgcatctggatccctggtctccgacaaacatcgccggcgtctttcggggtctcagaaattgatcgtcggaggtgtcgttctcgcgttatcattaagcctcatttggctaggtgggcgccaaaagaaggtgaatgagaacgcatcgccgtcaactttgatcgcaacaaacaccaagccatttcatccagctccgattgaggtgccgccggatcctccagcggttcaagaggctgttcagcctgctgctcctctaccgccgaggggcgaaccggagcggcatgagccacggccggaagaaacaccgatttttgcatatagcagcggcgatcaaggggtcagcaaacgcgccattcagggcgacacgggccgaagacaagaaggcaagcgtgacgacaactccttgccgaatggcgaagtgtccggcgagaacgatttgtcgatacgtatgaaacccaccgagctgcagcccagcagcgccacgctcttgccgcaccccgattttatggtaacgcaagggacaataattccgtgcatcttgcaaaccgcaatcgacacaaatttggcaggctatgtaaagtgtgtcttgcctcaggatattcgtggaacaacgaacaatatcgtgcttcttgatcgtggcaccaccgttgttggcgaaatacagcgtggcttgcaacagggagatgggcgcgtttttgtgttgtgggatcgcgccgagacacctgaccatgcgatgatctcgttaacatcgccaagcgcggacgaactcggtcgctcaggattgccgggctcggtcgacagccacttctggcagcgttttagcggagctatgctcttgagtgttgttcaaggcgccttccaggcagctagcacctacgccggcagctcgggtggcgggatgagcttcaacagctttcaaaataacggtgagcagacaactgagacagcccttaaggcaaccatcaacataccgccaaccctgaagaagaatcagggtgacaccgtttccattttcgtagcacgggacctcgatttctttggtgtttaccagctccgcctgactggcggcgccacgcgggggaggaaccgccgctcttaatgaattcaaatttccgcttagagataggatacattgtaaatggaagtggatccgcaactacgctttcttctgaagccgattttggaatggctcgatgacccgaagactgaagaaattgcgatcaatcgacctggagaggcatttgtgcgccaagccggcatttttaccaagatgcctttgcccgtctcttatgatgatcttgaagatatcgctattttagcgggcgcgctgagaaagcaggatgtcggaccacgtaaccccctctgcgccactgaacttcctggtggtgaacgactacaaatctgtctgccgccgaccgttccctcgggcaccgtcagcttgaccattcgacggccaagctcgcgtgtttctggtcttaaagaagtctcctcccgttatgatgcttcgaggtggaaccagtggcagacacgaaggaaacgccaaaatcaggatgatgaagctatccttcagcattttgacaacggggatttggaagcgtttctgcacgcatgcgtcgtcagccgactgacgatgttgctatgtggccctaccggaagcggcaagacaacaatgagcaagaccttgatcagcgccatccccccccaggaaaggctaatcaccatagaagatacgctcgaactcgtcattccacacgataatcatgttagactactctactccaagaacggtgctgggctgggtgctgtgagcgccgagcacttgctccaagcaagtctgcgtatgcggccggaccggatattgcttggcgagatgcgcgacgatgcagcatgggcttatctgagtgaagtcgtctcgggacatccgggatcgatttcaacaatacacggcgcgaatccaatccaaggattcaagaaactgttttcccttgtcaaaagtagcgcccaaggtgctagcttggaagatcgcacactgattgacatgctctctacggcgatcgatgtcatcattccattccgtgcctatgaggacgtttatgaagtaggcgagatctggctcgcggcggacgcacgacgccggggcgagaccataggcgatctccttaatcaatagtagctgtaacctcgaagcgtttcacttgtaacaacgattgagaacttttgtcataaaattgaaatacttggttcgcattttcgtcatccgcggtcagccgcaattctgacgaactgcccatttagctggagatgattgtacatccttcacgtgaaaatttctcaagcgctgtgaacaagggttcagattttagattgagaggtgagccgttgaaacacgttcttcttatcgatgacgatgtcgctatgcggcatcttattatcgaataccttacgatccacgccttcaaagtgaccgcggtagccgacagcacccagttcactagagtactctcttccgcgacggtcgatgtcgtggttgttgatctaaatttaggtcgtgaagatgggcttgagatcgttcgaaatctggcggcaaagtctgatattccaatcataattatcagtggcgaccgccttgaggagacggataaagttgttgcactcgagctaggagcaagtgattttatcgctaagccgtttagtacgagagagtttcttgcacgcattcgggttgccttgcgcgtgcgccccaacgttgtccgctccaaagaccgacggtctttttgttttactgactggacacttaatctcaggcaacgtcgcttgatgtccgaagctggcggtgaggtgaaacttacggcaggtgagttcaatcttctcctcgcgtttttagagaaaccccgcgacgttctatcgcgcgagcaacttctcattgccagtcgagtacgcgacgaggaggtttacgacaggagtatagatgttctcattttgcggctgcgccgcaaacttgaggcggatccgtcaagccctcaactgataaaaacagcaagaggtgccggttatttctttgacgcggacgtgcaggtttcgcacggggggacgatggcagcctgagccaattgcatttgattaatttaggtgactgaggacgcggccagcggcctcaaacctacactcaatatttggtgaggggttccgataggtccctcttcaccaattgctcgatggcttctctccagcaaagaatgacgcgagcgcggcggtagccagcttgtggccgaaagctcgagcggtctccaaccccaacggatcaaaatgacttcgagcgacctcgagcaacgcaaccgggaacatgcgtgaggtctgaacgagaacggatttttctgtagttgaagggatcggataacttttcggggccacgcgaaatgatccatctgccagcatgctttcgaaatcgtccaacgcgcgccttaaaatcatttgtagcgacttcgagggactgtattgccgaacgaggttgtcatatgttttcgacacttgaggcgcgggcggtcgcgctgaaagaaaaacctggagctttttcggggacggaggtggactaagggcatccacagttagcttaagttgtcgatcgggactgtaaatgtgatcggcgacgagaggctcacgttgctggtctttctcgtcggctttttcaggcaagtgctggaggtccagcttctggggaacaagtgtcgggttgggatggtggatctcgggtcgagcaccagcaagccgccgtgcttcgccgaccgacaatgcgggcttgcgaattgccatcttcaagcctccaagattttgctgatcagtttcgaaatgaccacgacttcctccatcgcaatccgaagattcctctctatgaggcgcatcgtcggatcagttcccgtgtttagtaatgtaagatgcaacatgccgcgttctttcatcgcggcaaatgcatctctttcatgcatgggagacggtacaactggaaggctctctagcgtctctgacatcctgcgttgcgatgttgtcaatcggccgaccgggacgcgttggcgcaaaacagctgtaggaattgccaaattttcactcaacagcagctcgatgacgtagcggtaggtagatagtgcctcatcgatgtcgagcggcgttagcatggtggggatcagaagcaggtttgagctagcgatgattgtgttgttgagctcgctcgagccgccacgcgtatcggccaacgcataatcaaatccttcgagctcggcattttcataggctgcttcaagaaggggcatttcgtcggcggaatagacttcacagcgaggatcccaggtactgctttgtaaggcgttttctctccatcgcgtcagaggccggttttcgtcggcatcaaagagggccactcgtttaccgtcatttgccaaagcagcgcaaaggcccatgagtgcggtggttttgccagcaccccctttgaaagaacaaaacgtcaaaagttgcatattctgatcccgcctatcctgtgaaaccggagtgcatttgtatttttgttcgtataaatgtttttgtgattatcgatgagtaaaagcgttgttacactatttttatttcacattcgttataagacaattgcaaatgtagcaagtatattcagtattgactgtaaatgtactgttgatttcatattgagcagggctagacttccatccgtctacccgggcacatttcgtgctggagtatccagaccttccgctttctttggaggaagctatgtcaaaacacaccagagccacgtcgagtgagactaccatcaaccagcatcgatccctgaaagttgaagggttcaaggtcgtgagtgcccgtctgcgatcggccgagtatgaaaccttttcctatcaagcgcgcctgctgggactttcggatagtatggcaattcgcgttgcggtgcgccgcatcgggggctttctcgaaatagatgcagacacacgagaaaagatggaagccatacttcagtccatcggaatactctcaagcaatgtatccatgcttctatctgcctacgccgaagaccctcgatcggatctggaggctgtgcgagatgaacgtattgcttttggcgaggctttcgccgccctcgatggactactgcgctccattttgtccgtatcccggcgacggatcgacggtcgctcgttactgaaaggtgccttgtagcacttgaccacgcacctgacgggagaaaattggatgcccgatcgcgctcaagtaatcattcgcattgtgccaggaggtggaaccaagacccttcagcagataatcaatcagctggagtacctgtcccgaaagggaaagctggaactgcagcgttcagcccggcatctcgatattcccgttccgccggatcaaatccgtgagcttgcccaaagctgggttacggaggccgggatttatgacgaaagtcagtcagacgatgacaggcaacaagacttaacaacacacattattgtaagcttccccgcaggtaccgaccaaaccgcagcttatgaagcaagccgggaatgggcagccgagatgtttgggtcaggatacgggggtggccgctataactatctgacagcctaccacgtcgaccgcgatcatccacatttacatgtcgtggtcaatcgtcgggaacttctggggcaggggtggctgaaaatatccaggcgccatccccagctgaattatgacggcttacggaaaaagatggcagagatttcacttcgtcacggcatagtcctggatgcgacttcgcgagcagaaaggggaatagcagagcgaccaatcacatatgctgaatatcgacgccttgagcggatgcaggctcaaaagattcaattcgaagatacagattttgatgagacctcgcctgaggaagatcgtcgggacctcagtcaatcgttcgatccatttcgatcggacgcatctgccggcgaaccggaccgtgcaacccgacatgacaaacaaccgcttgaaccgcacgcccgtttccaggagcccgccggctccagcatcaaagccgacgcacggatccgcgtaccattggagagcgagcggggtgcccaaccatccgcgtccaaaatccctgtaactgggcatttcgggattgagacttcgtatgtcgctgaagccagcgtgcccaaacaaagcggcaattccgatacttctcgcccggtgactgacgttgccatgcacacagtcgagcgccagcagcgatcaaaacgacgtcatgacgaggaggcaggtccgagcggagcaaaccgtaaaagattgaaggccgcgcaagttgattccgaggcaaatgtcggtgagcccgacggtcgcgatgacagcaacaaggcggctgatccggtgtctgcttccatccgtaccgagcaaccggaagcttctccaacgtgtccgcgtgaccgtcacgatggagaattgggagaacgcaaacgtgcaagaggtaatcgtcgcgacgatgggcgcggggggacctagactagtagacaggaaggaccgaataatggcaaatggtcagttcacgatacgctctgctcgcccggcctccgtcggactgacaggcgaacggcgtggagccgcatccgcctctagctctgcactgtccaatgttcaaagagatgttagggataggctgattccaactagctcaccaagattaccaaatgcagccatattgcgtgattcctcgggaagagcgtcgactggtctgcggtacatggcggctactcttcattggtctgcgatcgcgccattatcgctaataaacagcaacgacctggctccggccgcttatgactttgagacgcgaaataacgcaagaaatgtgactgccaaagtcggcagggcagtccctgttcccaagcaaggcgggctcggcaaaacgctcgcacccgtaccccttagtacacgtatatcaagggtcaattccgaccgaagactgcccgctgacgcagaagaccgccctgaaacgcgcgacccccagaaaggacgtggcagtcatggtgcgacgccaaccttacatgaaaagattggaaccgcgtttgctcgaagattgcgaaagcatacgtactatattgtttgcagttgctgccagacccggagcgcgttgacgatgggtgcaaagatttcggtgaagtcatgaactccagcaagacttcgccccagcgtatgaccctgagcatcgtatgttcgctggcagccggtttttgtgcggccagctgctatgtaacgttccgccggggcttcaacggcgaagcgatgatgacgttcgacgttttcgctttttggtatgagaccccgctttacttgggttatgccagcaccgtcttctggcgtggtttatctgttgtcatctttacctcgctgatcgttctttcaagtcagctcatcatatcgctgcgcaatcagaagcatcatgggacagctcgttgggcagaaattggcgaaatgcggcatgctggttatctgcagcgttacagtcgcatcaaggggccgatctttggaaagacatgtggtcccctttggttcggcagttatttgaccaatggcgaacagccacacagtcttgtcgtcgcgccaacgcgtgctggcaaaggcgtcggcatcgtcattccaacgctgttgaccttcaagggctcggtaatcgcccttgacgtcaagggagaattgtttgaactgacgtccagagcacgcaaagcgagcggcgacgcagttttcaagttctcccccctagatcctgagcggaagactcattgttacaatccggtcctggatattgccgcacttccgcccgaacgccagttcactgaaacacgccgtctagctgcgaaccttattacggctaagggaaagggagcagaaggctttattgacggcgcacgtgacctgttcgtcgcgggaatccttacctgcattgagcgtggcacaccaacgattggcgcggtatatgacctatttgcgcagcctggcgaaaagtataagctttttgcgcaactcgcggaggaaagcctaaacaaagaggctcagcgtatcttcgataatatggcgggcaacgacacgaaaattctgacatcgtacacctctgtgctgggcgacggtggactgaacctgtgggctgatccgcttatcaaagcagcgacaagccggtcagacttttccgtttacgatctccggaggaagaagacctgcatttatctttgtgtcagtcccaacgatctggaggtcttggcaccacttatgcgcctgatgtttcagcagctcgtgtcaatcttgcagagatcgctgccaggtgaagacgagtgccatgaagttttatttctcctcgacgaattcaaacacctgggcaagcttgaggccatagagaccgcgatcacaaccatcgccggttacagaggccgctttatgtttattattcaaagtctttcggccttgtcgggcacatacgatgacgcaggaaaacaaaactttctgagcaatactggcgtacaagtatttatggccacggctgatgacgaaactccaacctacatctcaaaagctatcggcgaatatacgtttaaagcgcgttcgacctcttacagtcaagccagaatgttcgaccacaacatccagatttctgatcaaggtgcagcccttttgcgccccgaacaagtgcgcctgctagacgatcagagtgaaatcgttctcatcaaagggcgacctccactcaaattacgaaaggtgcagtattattccgatcgtacgctgaaaggccttttcgaacgccagatgggctctctgcctgagcccgcacccttgatgctttccgactatagcaacgatcaagttcaataccacttggctccgatagcaaattttaatgaggatgctgcaccgcaaaacagaactgtggccgaggaccatggaagtgttaaagtcggtgctgatatccctgaacgcgtgatgggaataaatggtgacgaggaacaagccgatgcgggcgagataccgccggaatcggttgtgcctccagaattgacgctcgctctgaccgctcaacagcaattgttggaccagattattgcacttcagcaaagatcgaggtccgcaccggcatagcctgcgaaatgatcttaatggtgcaattcgtttcaggcggcatgttgcggttcaacaaagtgtacgccagatcccaattggccctttacgaggtgtcggtatgacaggaaagtcgaaagttcacataagaggttcggctgacgcgcttcctgacgttcctggcggaagtactaccgccccttttttaaccgaaccttctcgggatcaggttgatgcctcgtttgaggtccaaaccgactacagccagtctacttccgtgtcgtttacctatgatggtgttggacttggtcctgccgagcgtgcggcttacgagaactggtgcgaaccgggccggcccacttggaaagatcttataatcaaggcacgtgtcgatccgattgacgatgtgacctggctccgagatttagaagaggacaccccctcaaccttcagatacgaagggatgcctctgggcatcggggaacgacaggcctacgaaaattggcaagaggacgctcagccgacatgggaagaccttgttgtcagcgcacgcttgacggaacttggccgtccacacgggattaccggcgagtatacatccctcgcaggatcgaagaatacaagttcaatttcattgaagcgaaagcggagcaacttaattgatgatgagaattcatccggatcgttttcatatgacgggatgaagctcggggaagccgagcgttctgcatatggtgactgggccgaggcggagccacccacgtggaaagatttggtattgagggcacgcgtttcctcgatcaatgactctgcttggctttttgattcacaaacatcttcatcatcatttgaatacaacggtgttcccttgggcgagccggaacggcaggctctcagacaatggcaaggagacgctcagcctacctgggaagatctcgttgttaacgcgcgtatggcagaactttgccatgctggttggattgaaggtcaaaaaggttgctttgaagagcgcggggaggctctgcccgcgtcggaacgcggttcgcaacgccccattggtcaacggacagattcctccgattcttttgtgtatgatggcacaaggctcggagcacctgagcgaactgcttatgaacgctggagtaagagggaacgcccgacttgggaagatctcatcttagatgcacaccaggccaggactgaaagtgacgctgttacgacccaagcgattggtcagtcgtcctcaccggttttcttatatgaaggaaagtcgctcggagacagggaacgaaaggcttacgaaaaatggcggcagccagcccaaccgcgatggcaaaatcttgtagtgaacgctcgtctggcagaaatcgatccctcagcctggattgccgatgagcgcgatccgcttgatgatagcgacgcgcttggtcgcccgtcgtacacaagcttgacggatagatcagacgtccctttagacgatcaatcaatctatcgtcgttccgacctagtaagggagcaggtgccagaatcgtctcaaaggcaattcgcagcatgttcagaatctgaaacgaggcctgtgcaatggtttactgcttctgggtcagatgcaaacaatacggaaaatatcaccgccagcgatcccgtcgatcgcacgggtggagttaagcggctaggctccaaaagcgacagaaccgttacagcttctatccatgacgtgaattccagcacaaggcgactgttgcttaacgaatttggatcggaggctccgcgcccttcgccagaaaagactgttcgcttaagaagcgacaatattggcacctatgggagccggaaaaatgaacgagcgcggctcgcgaccgaaaccggtgcgtatgagtcggagcatattttcgggttcaaggctgtccacgatactgcgagagcgacgaaagagggccggcgtctcgaaaggcccatgcccgcctaccttgaggataaggggcttcatcgccaacatattggcaccgggagaggacggaccaaacttgtcgggcgcggatggccggatgacacaagctatcgctcggatcaaagggcaactctgtcggaccccgttgcgcgctcggaaggcgcgacggcctcaaatgggtatcaattgaaccaattgggttacgcgcaccaactcgctagcgatggcctgcaaagtgaatcgcccgatggtgttgccttgccaattcaagtggcaacaacgagctacaactatacagtgagccgcgatcctgtccttgttccgccggataaaaacgaagcccctcaattgctgcatcttggtccccgtggtcaaaccgaagctgttcttgcccgcgaaacagcattgactggaaaatggccgactctcgagcgtgagcagcaagtgtatcgcgagtttttggccttatatgacgtaaaaaaagatcttgaggccaaatcagtcggcgtaagacggaaaaaaaaagaagttatttctgcgttagaccgaactgcgcgcttgataagcacgtcgccttcgaaagctcgatccaaagcagagactgaaaaagccattgatgagctcgatgatcgacgagtttatgatccgcgtgatcgagctcaagacaaagcgtttaaacgctgataagtcgccaatatagtgatcatttgcagtattcgcatcgatcgctggttgatattctgccgctggtcgaccggctgctcgtcgccaaaaatgctcacagggatacgatggcctcggtcaggccgcgtgcgtcctgtctttccagttcctccctttcagctcgattgtggcatcatttattgcctgctcattgcagttgaaacgcgatatccgtttcaagacccgggtatggatggtactttggagatatgagcacttgccagacttcccggtcggagacttaaaaattccgataagaggttacggacgacggaccttataagtggatcgtctagtggtggcgccgatcaaaacagttccgcccccggctttgctcaaagtagcaaagcagctttatctcgggttgcggaggattttctagaaaaccgcaattttgcaggagagaacatatggccatcatcaagccgcatgtgaacaaaaataggacaacctcgccgatagagagaccggagtctctcatagaggaaatgagcggcagtcatccgccgagtggttttaccaacctggatctcgctatgatcgagctggaggactttgtccatcggtgcccgctcccagaagacaatcttgctggtcagaaggagtgagacgatggatccgtctagcaatgagaatgtctatgtgggtcgcggtcacaacatcgaaaatgatgatgacactgaccccaggcgttggaagaaggcgaatatcagttccaacaccatctccgatattcagatgacgaatggcgaagacgtacaatcagggagccctacccgaacggaagttgtaagcccacgtctggattatggatcggtcgactcctcctccagcctttattctggcagcgagcacggaaatcaagctgagattcaaaaagagctgtccgtcttgttctcgaacatgtctttgccaggcaacgatcggcgcccggacgaatacattctcgtgcatcaaacgggacaagatgcttttactggtattgccaaaggcaacctcgaccaaatgcccaccaaggcggaatttaacgcgtgctgccgtctctacagggacggagccggtaattactacccgccacctctcgcattcgacaagattagcgttccagagcaactggaggaaaaatgggggatgatggaggcgaaggaacgtaacaaactgcggtttcagtacaagttggacgtatggaatcatgcgcacgctgatatggggatcacgggcacagagatcttttatcaaacagataagaacataaagctcgaccggaattataaactaagacctgaagaccgatacgtacaaacagaaaaatacgggcgccgggaaattcaaaagcgatatcaacacgaactccaggctggttcgctgctgcccgatattatgatcaaaactccccaaaatgacatccacttcgtgtacaggtttgccggcgacaattacgccaacaaacagttcagcgagtttgaacacaccgtcaagcgcaggtatggcgacgagactgagatcaaattgaagtcaaagtcaggcattatgcatgactcgaaatatctggaatcctgggaacggggcagtgcggatattcgcttcgcggaattcgttggggaaaatagagctcacaatcggcagtttccaactgcgacagtaaatatgggacagcagccagacgggcagggcggtttgacccgcgaccgtcatgtgagcgttgacttcctaatgcaaagcgcacccaattcgccttgggcgcaagctttgaaaaagggagaactgtgggatcgcgttcagttgcttgctcgcgacggcaaccgctatctgtcgccgcccagattggaatattctgaccctgcacatttcaccgagttgatgaaccgggttggtttacccgcatcgatgggtcggcaaagccatgcggctagtatcaaattcgaaaagtttgacgcgcaggcagcggttattgtcttaaatggcccagagttacgtgacattcatgacttgtctcctgaaaaactgcaaaatttgtccaccaaagatgtcatcgtcgccgatcgcaatgagaatggtcagagaactggcacgtacaccagcgtcgcggaatatgagcgcttgcagttaaggctgccacccgatgcagcgggggtgcttggtgaagcaactgacaaatattcacgtgatttcgttcggccagagccggcgtcgcgtccaatcagtgacagccgcaggatatacgaaagtcgaccgcgtagccaaagcgtcaacagcttttgacgttcctgctgccgcgtcaacgaggaagctcgtttgacccgggtttgccaatgaaagggctcaatcatggtgaacactacaaagaaaagttttgcgaagtcgcttacggcagatatgcgccgttctgctcagcgcgttgtcgagcaaatgcgaaaagcattgattaccgaagaagaggcgctcaagcggcaagccagactggagagtcccgataggaagcgaaagtatgctgctgatatggcgatagtcgacaaactcgacgtagggtttcgaggcgaaataggctataaaattcttggaaataaccggcttcgagtagacaaccataaagaattaacgcgtgagcacggtagacttcgcaaaaccaaaacggttctgaagcgtaacccggtgacgcaggaagtctatttgggtttatatgaaaggaagtcctggttaagtgtcagcagccatttgtatgctgcggacggcacactccgcatgaagcacgtgaaatacaaagacggacgttttgaggaaaaatgggagcgcgacgaaaatggcgacctgatccgcacaaggtacgccaaccgtggcaggctctttcaacctgtatccgagaaaatgggcgcgccgtatcggagcggccctgacgaccggctctatcgcgatctaacccgtcgaaacggtttcagacgggagacattcgaacgggacgatcacggaaacctcgagcgtatcggcagcaaccatgtcggcttttccaagatttcagtgaaggcacccaatcgtcaaacctcccagacgaagattcaaaaacttggtggcgctttcaacaaatcttttaggtcccttctggacaaggagggcaatgaaatgggccgcgatattttgagccatcgacggctctataacaagcggtctgctgtctacgatgaagctaccggacaattgaagagtgccaagcataccttcggcaagatctacaggagcgaaaccgaatatctcagcgcgggcctcaagaaggtttcaaaaaagatactcggggtgacggtctaccggaaatttgcggcgctcagcgagcgagaatccgaggctgagagactgcgtagttttgaatccggtgcgcatcgccagatctggcaggagcgggcagcgattcccggttcgcccctcccggagactgatgacattcatttcgcacagcagtcgcacctagccaaagccaaccctgatcacgtcgaagctgacgtcacgcgtgtgacagatcaacatgttgatgttgctggacaaacatcatcgtctccccaacggaacttggaaggatggttagattctcaatcacgatacaagccagcaaacatgctgttgtcaaatccagaccttcaagcgaacggacctcgcccatacgaagggttagctcatctcaccctccggcgcgataatgaatctgacgggcacaaggagaatgatcagcggctgcgacatttctcccagccagagccgttggtgttaccgcatcccgggtcgccggaaataactaaggtgtttggctcgcggggagagccggcacacccgagtggaaatctgcacacggcggttggagaaacggcttgcgaaggaccggtgatgtcttcatcctcggacaatcatcagccagctccaggacagcaagaacttttaagtttccttcataatgcgccagccccagtttctgtggcaatacatgatgatcaagagcgacttgcgggggaggcgcccggcggctctttcagaggtagctcagggcgaacgagttcaatgtcggagagtatcttcgacgaagatgtacaagggcatttggtacgggattattcgatcaatactactaacgggtttattgacccgcaatcgttgttcggtgaaccggacttatcgagaggtccaaaatcggggccagaaattccatcggaagattaccatttgtcagcttcggaacaggaaaatttgctgaatcaattgcttagtgtgccactgccggttccttcaccgaagcccgaatgcgcgaggtctatgattttcgaaggttcacgttcaagagagcgttccacctccagagggttctaaggtggaacgcgtctaggcttgcctatcatcaccacctcatgatggtcgcggagaccttcgaagagatatccgacatcattggagaagctgggccggaaactagtgtacctcgcgaatgcatctagatccaatccaatatgcatggcatgccgaatccatgtgggagtttattcttgacacagatatttatgatataataactgagtaagcttaacataaggaggaaaaacatatgttacgcagcagcaacgatgttacgcagcagggcagtcgccctaaaacaaagttaggtggctcaagtatgggcatcattcgcacatgtaggctcggccctgaccaagtcaaatccatgcgggctgctcttgatcttttcggtcgtgagttcggagacgtagccacctactcccaacatcagccggactccgattacctcgggaacttgctccgtagtaagacattcatcgcgcttgctgccttcgaccaagaagcggttgttggcgctctcgcggcttacgttctgcccaagtttgagcagccgcgtagtgagatctatatctatgatctcgcagtctccggcgagcaccggaggcagggcattgccaccgcgctcatcaatctcctcaagcatgaggccaacgcgcttggtgcttatgtgatctacgtgcaagcagattacggtgacgatcccgcagtggctctctatacaaagttgggcatacgggaagaagtgatgcactttgatatcgacccaagtaccgccacctaataatgtctaacaattcgttcaagccgacgccgcttcgcggcgcggcttaactcaagcgttagatgcactatacgtaccaatccaaatcggatccccctgcagggctgagataggtgcctcactgattaagcattggtaactgtcagaccaagtttactcatatatactttagattgatttaaaacttcatttttaatttaaaaggatctaggtgaagatcctttttgataatctcatgaccaaaatcccttaacgtgagttttcgttccactgagcgtcagaccccgtagaaaagatcaaaggatcttcttgagatcctttttttctgcgcgtaatctgctgcttgcaaacaaaaaaaccaccgctaccagcggtggtttgtttgccggatcaagagctaccaactctttttccgaaggtaactggcttcagcagagcgcagataccaaatactgtccttctagtgtagccgtagttaggccaccacttcaagaactctgtagcaccgcctacatacctcgctctgctaatcctgttaccagtggctgctgccagtggcgataagtcgtgtcttaccgggttggactcaagacgatagttaccggataaggcgcagcggtcgggctgaacggggggttcgtgcacacagcccagcttggagcgaacgacctacaccgaactgagatacctacagcgtgagctatgagaaagcgccacgcttcccgaagggagaaaggcggacaggtatccggtaagcggcagggtcggaacaggagagcgcacgagggagcttccagggggaaacgcctggtatctttatagtcctgtcgggtttcgccacctctgacttgagcgtcgatttttgtgatgctcgtcaggggggcggagcctatggaaaaacgccagcaacgcggcctttttacggttcctggccttttgctggccttttgctcacatgttctttcctgcgttatcccctgattctgtggataaccgtattaccgcctttgagtgagctgataccgctcgccgcagccgaacgaccgagcgcagcgagtcagtgagcgaggaagcggaagagcgcctgatgcggtattttctccttacgcatctgtgcggtatttcacaccgcatatggtgcactctcagtacaatctgctctgatgccgcatagttaagccagtatacactccgctatcgctacgtgactgggtcatggctgcgccccgacacccgccaacacccgctgacgcgccctgacgggcttgtctgctcccggcatccgcttacagacaagctgtgaccgtctccgggagctgcatgtgtcagaggttttcaccgtcatcaccgaaacgcgcgaggcagcagatctatcgatggtacctatctgcagacggaagggattcctgttaattaaaacagcttgcgtcatgcggtcgctgcgtatatgatgcgatgagtaaataaacaaatacgcaaggggaacgcatgaaggttatcgctgtacttaaccagaaaggcgggtcaggcaagacgaccatcgcaacccatctagcccgcgccctgcaactcgccggggccgatgttctgttagtcgattccgatccccagggcagtgcccgcgattgggcggccgtgcgggaagatcaaccgctaaccgttgtcggcatcgaccgcccgacgattgaccgcgacgtgaaggccatcggccggcgcgacttcgtagtgatcgacggagcgccccaggcggcggacttggctgtgtccgcgatcaaggcagccgacttcgtgctgattccggtgcagccaagcccttacgacatatgggccaccgccgacctggtggagctggttaagcagcgcattgaggtcacggatggaaggctacaagcggcctttgtcgtgtcgcgggcgatcaaaggcacgcgcatcggcggtgaggttgccgaggcgctggccgggtacgagctgcccattcttgagtcccgtatcacgcagcgcgtgagctacccaggcactgccgccgccggcacaaccgttcttgaatcagaacccgagggcgacgctgcccgcgaggtccaggcgctggccgctgaaattaaatcaaaactcatttgagttaatgaggtaaagagaaaatgagcaaaagcacaaacacgctaagtgccggccgtccgagcgcacgcagcagcaaggctgcaacgttggccagcctcgcagacacgccagccatgaagcgggtcaactttcagttgccggcggaggatcacaccaagctgaagatgtacgcggtacgccaaggcaagaccattaccgagctgctatctgaatacatcgcgcagctaccagagtaaatgagcaaatgaataaatgagtagatgaattttagcggctaaaggaggcggcatggaaaatcaagaacaaccaggcaccgacgccgtggaatgccccatgtgtggaggaacgggcggttggccaggcgtaagcggctgggttgcctgccggccctgcaatggcactggaacccccaagcccgaggaatcggcgtgagcggtcgcaaaccatccggcccggtacaaatcggcgcggcgctgggtgatgacctggtggagaagttgaaggcagcgcaggccgcccagcggcaacgcatcgaggcagaagcacgccccggtgaatcgtggcaagcagccgctgatcgaatccgcaaagaatcccggcaaccgccggcagccggtgcgccgtcgattaggaagccgcccaagggcgacgagcaaccagattttttcgttccgatgctctatgacgtgggcacccgcgatagtcgcagcatcatggacgtggccgttttccgtctgtcgaagcgtgaccgacgagctggcgaggtgatccgctacgagcttccagacgggcacgtagaggtttccgcagggccggcaggcatggccagtgtgtgggattacgacctggtactgatggcggtttcccatctaaccgaatccatgaaccgataccgggaagggaagggagacaagcccggccgcgtgttccgtccacacgttgcggacgtactcaagttctgccggcgagccgatggcggaaagcagaaagacgacctggtagaaacctgcattcggttaaacaccacgcacgttgccatgcagcgtacgaagaaggccaagaacggccgcctggtgacggtatccgagggtgaagccttgattagccgctacaagatcgtaaagagcgaaaccgggcggccggagtacatcgagatcgagctagctgattggatgtaccgcgagatcacagaaggcaagaacccggacgtgctgacggttcaccccgattactttttgatcgatcccggcatcggccgttttctctaccgcctggcacgccgcgccgcaggcaaggcagaagccagatggttgttcaagacgatctacgaacgcagtggcagcgccggagagttcaagaagttctgtttcaccgtgcgcaagctgatcgggtcaaatgacctgccggagtacgatttgaaggaggaggcggggcaggctggcccgatcctagtcatgcgctaccgcaacctgatcgagggcgaagcatccgccggttcctaatgtacggagcagatgctagggcaaattgccctagcaggggaaaaaggtcgaaaaggtctctttcctgtggatagcacgtacattgggaacccaaagccgtacattgggaaccggaacccgtacattgggaacccaaagccgtacattgggaaccggtcacacatgtaagtgactgatataaaagagaaaaaaggcgatttttccgcctaaaactctttaaaacttattaaaactcttaaaacccgcctggcctgtgcataactgtctggccagcgcacagccgaagagctgcaaaaagcgcctacccttcggtcgctgcgctccctacgccccgccgcttcgcgtcggcctatgcatataattgtggtttcaaaatcggctccgtcgatactatgttatacgccaactctgaaaacaactttgaaaaagctgttttctggtatttaaattaaaaatgaagcgtacgttggaatcgcttctacaaaactcacagaaacaatcaaacaaacatacacagcgatttattcacacgaacccgaattacaacggtatatatcctgtcagccaacaccaaaacatcaaaaaaatcgggatcaggatcaggatctgcggccgcatcctgcaggtcgactctagaggatcctcatcgctatcaactttgtatagaaaagttgggccgaattcgagctcggtacggccagaatccggtaagtgactagggtcacatcgaattcccataggattggggccagaatggccgcggccgcatcaggatattcttgtttaagatgttgaactctatggaggtttgtatgaactgatgatctaggaccggataagttcccttcttcatagcgaacttattcaaagaatgttttgtgtatcattcttgttacattgttattaatgaaaaaatattattggtcattggactgaacacgagtgttaaatatggaccaggccccaaataagatccattgatatatgaattaaataacaagaataaatcgagtcaccaaaccacttgccttttttaacgagacttgttcaccaacttgatacaaaagtcattatcctatgcaaatcaataatcatacaaaaatatccaataacactaaaaaattaaaagaaatggataatttcacaatatgttatacgataaagaagttacttttccaagaaattcactgattttataagcccacttgcattagataaatggcaaaaaaaaacaaaaaggaaaagaaataaagcacgaagaattctagaaaatacgaaatacgcttcaatgcagtgggacccacggttcaattattgccaattttcagctccaccgtatatttaaaaaataaaacgataatgctaaaaaaatataaatcgtaacgatcgttaaatctcaacggctggatcttatgacgaccgttagaaattgtggttgtcgacgagtcagtaataaacggcgtcaaagtggttgcagccggcacacacgagtcgtgtttatcaactcaaagcacaaatacttttcctcaacctaaaaataaggcaattagccaaaaacaactttgcgtgtaaacaacgctcaatacacgtgtcattttattattagctattgcttcaccgccttagctttctcgtgacctagtcgtcctcgtcttttcttcttcttcttctataaaacaatacccaaagagctcttcttcttcacaattcagatttcaatttctcaaaatcttaaaaactttctctcaattctctctaccgtgatcaaggtaaatttctgtgttccttattctctcaaaatcttcgattttgttttcgttcgatcccaatttcgtatatgttctttggtttagattctgttaatcttagatcgaagacgattttctgggtttgatcgttagatatcatcttaattctcgattagggtttcatagatatcatccgatttgttcaaataatttgagttttgtcgaataattactcttcgatttgtgatttctatctagatctggtgttagtttctagtttgtgcgatcgaatttgtcgattaatctgagtttttctgttaattaacagatggcctcctccgagaacgtcatcaccgagttcatgcgcttcaaggtgcgcatggagggcaccgtgaacggccacgagttcgagatcgagggcgagggcgagggccgcccctacgagggccacaacaccgtgaagctgaaggtgaccaagggcggccccctgcccttcgcctgggacatcctgtccccccagttccagtacggctccaaggtgtacgtgaagcaccccgccgacatccccgactacaagaagctgtccttccccgagggcttcaagtgggagcgcgtgatgaacttcgaggacggcggcgtggcgaccgtgacccaggactcctccctgcaggacggctgcttcatctacaaggtaagtttctgcttctacctttgatatatatataataattatcattaattagtagtaatataatatttcaaatatttttttcaaaataaaagaatgtagtatatagcaattgcttttctgtagtttataagtgtgtatattttaatttataacttttctaatatatgaccaaaacatggtgatgtgcaggtgaagttcatcggcgtgaacttcccctccgacggccccgtgatgcagaagaagaccatgggctgggaggcctccaccgagcgcctgtacccccgcgacggcgtgctgaagggcgagacccacaaggccctgaagctgaaggacggcggccactacctggtggagttcaagtccatctacatggccaagaagcccgtgcagctgcccggctactactacgtggacgccaagctggacatcacctcccacaacgaggactacaccatcgtggagcagtacgagcgcaccgagggccgccaccacctgttcctgtagcggccaacctagacttgtccatcttctggattggccaacttaattaatgtatgaaataaaaggatgcacacatagtgacatgctaatcactataatgtgggcatcaaagttgtgtgttatgtgtaattactagttatctgaataaaagagaaagagatcatccatatttcttatcctaaatgaatgtcacgtgtctttataattctttgatgaaccagatgcatttcattaaccaaatccatatacatataaatattaatcatatataattaatatcaattgggttagcaaaacaaatctagtctaggtgtgttttgcgaatgcggccggccagaatggcctcaagtttgtacaaaaaagcaggctccggccagaatggcccggaccgggttaccgaattcgagctcggtaccctgggatccgatatcgatgggccctggccgaagcttggtcacccggtccgggcctagaaggccgatctcccgggcacccagctttcttgtacaaagtggccgttaacggatctggccgcggccgggtgattgcggttacatcatgtacggaaaaataattctaatccttgatttaaatttgaacttgactatttatttattctttatttcattttgtaaatcattttatgtatctcctggcaagcaattttatccaccttgcaccaacaccttcgggttccataatcaaaccaccttaacttcacaccatgctgtaactcacaccgcccagcatctccaatgtgaaagaagctaaaatttaataaacaatcatacgaagcagtgacaaaataccagatggtattaatgcttcgataaaattaattggaaagtataaaatggtagaaaataataaattataattaatttaagtaagataaaaaataattaaaaactaaaatgttaaaattttaaaaaaattattttaaataatatttaaaaacattaaaaatcattttaaaaaatttatttatagaacaattaaataaatatttcagctaataaaaaacaaaagcttacctagccttagaagacaacttgtccaacaattagatgatacccattgcccttacgttttctttaacatcaattattgtttttgtcaacaagctatcttttagttttattttattggtaaaaaatatgtcgccttcaagttgcatcatttaacacatctcgtcattagaaaaataaaactcttccctaaacgattagtagaaaaaatcattcgataataaataagaaagaaaaattagaaaaaaataacttcattttaaaaaaatcattaaggctatattttttaaatgactaattttatatagactgtaactaaaagtatacaatttattatgctatgtatcttaaagaattacttataaaaatctacggaagaatatcttacaaagtgaaaaacaaatgagaaagaatttagtgggatgattatgattttatttgaaaattgaaaaaataattattaaagactttagtggagtaagaaagctttcctattagtcttttcttatccataaaaaaaaaaaaaaaaatctagcgtgacagcttttccatagattttaataatgtaaaatactggtagcagccgaccgttcaggtaatggacactgtggtcctaacttgcaacgggtgcgggcccaatttaataacgccgtggtaacggataaagccaagcgtgaagcggtgaaggtacatctctgactccgtcaagattacgaaaccgtcaactacgaaggactccccgaaatatcatctgtgtcataaacaccaagtcacaccatacatgggcacgcgtcacaatatgattggagaacggttccaccgcatatgctataaaatgcccccacacccctcgaccctaatcgcacttcaattgcaatcaaattagttcattctctttgcgcagttccctacctctcctttcaaggttcgtagatttcttccgtttttttttcttcttctttattgtttgttctacatcagcatgatgttgatttgattgtgttttctatcgtttcatcgattataaattttcataatcagaagattcagcttttattaatgcaagaacgtccttaattgatgattttataaccgtaaattaggtctaattagagtttttttcataaagattttcagatccgtttacaacaagccttaattgttgattctgtagtcgtagattaaggtttttttcatgaactacttcagatccgttaaacaacagccttatttgttgatacttcagtcgtttttcaagaaattgttcagatccgttgataaaagccttattcgttgattctgtatggtatttcaagagatattgctcaggtcctttagcaactaccttatttgttgattctgtggccatagattaggattttttttcacgaaattgcttcttgaaattacgtgatggattttgattctgatttatcttgtgattgttgactctacagaatatgagccccgagagaaggccagctgacattcgccgtgcaactgaggctgatatgcctgctgtgtgtacaattgtcaaccactatatcgaaacttcaacagttaactttaggactgaaccacaagagccccaagagtggaccgacgatcttgtgagattgcgcgaaaggtacccttggcttgttgcagaagtggacggagaagtggcaggcatcgcctatgctggtccctggaaggccaggaatgcctacgattggactgcagagtctacagtttacgtgtccccacgtcatcagagaaccgggttaggctcaacattgtatacccacctcttgaaaagtctcgaagctcaaggtttcaaatccgtagttgctgtcattgggctccctaatgatccttctgttcgcatgcatgaggctcttggttacgccccaaggggaatgcttagagcagcaggctttaagcatggaaactggcatgatgttggattctggcagttggatttcagtttacctgttccaccaagaccagtactgcctgtgaccgaaatagtttaaaccgcgcctaggaaacttatctctgttatgaatcagaagaagttcatgtctcgtttcatttaaaactttggtggtttgtgttttggggccttgtaaagcccctgatgaataattgttcaactatgtttccgttcctgtgttatacctttctttctaatgagtaatgacatcaaacttcttctgtattgaaattatgtccttgtgagtctctttatcatcgtttcgtctttacattatatgtgctacttttgtctaatgagcctgaaaagtggctccaatggtacgcactggaagatttgttggcttctggtagatatagcgacagtgttgagcttgtaatatcatgtctcttattgctaaattagttcctttcttaacagaaaccttcaaagtttttgtttttgttttcatttacctaatgtacacatacgctggccatgactaacaacatgtccaggcttagagcatatttttttctagcttaaattgttaacttgtcattcagtaaaatccgagaattgtgaagctctaattgaagctaattcgttttataaagtcagttaaaaagtatactaaattatccaacttttcttcaaaatctcaaaattctatgacaaaacgatagtctttgtttatgtcagtaccacaaagaggtggaaaaaaacaccaaaaaaacaataagcaaactatacactgagaagaaaaataaaagagagctcaatagatgttttatactaacggtagattagatcaaagatccaagctttactctacatagagcagaacccagaatcccttcatatctcttttattctagcaccgataatctactgaaaagaagacacttagagctctgtctctttgtcaaagaagtcccagccgtcatccagaagctccttacgttcattaacagagggcaacttta
